(19) United States
(12) Patent Application Publication
(10) Pub. No.: US 2002/0123095 A1
(43) Pub. Date: Sep. 5, 2002

(54) Estrogen receptor alpha variants and methods of detection thereof

(75) Inventors: Francis Kalush, Rockville, MD (US); Michael J. Cassel, San Leandro, CA (US); Stuart Soo-In Hwang, San Carlos, CA (US); Emily S. Winn-Deen, Potomac, MD (US)

Correspondence Address: CELERA GENOMICS CORP., ATTN: ROBERT A. MILLMAN, PATENT DIRECTOR, 45 WEST GUDE DRIVE, C2-4#20, ROCKVILLE, MD, 20850, US

(73) Assignee: PE CORPORATION (NY), Norwalk, CT (US)

(21) Appl. No.: 09/933,267

(22) Filed: Aug. 21, 2001

Related U.S. Application Data
(63) Continuation-in-part of application No. 09/826,314, filed on Apr. 5, 2001.
Application No. 09/826,314 is a continuation-in-part of application No. 09/804,076, filed on Mar. 13, 2001.
Application No. 09/804,076 is a continuation-in-part of application No. 09/768,184, filed on Jan. 24, 2001.
Application No. 09/768,184 is a continuation-in-part of application No. 09/692,414, filed on Oct. 20, 2000.
(60) Provisional application No. 60/183,756, filed on Feb. 22, 2000.
(60) Provisional application No. 60/160,626, filed on Oct. 20, 1999.

(51) Int. Cl. C07K 14/705; C07H 21/04; C07K 16/28; C12P 21/02; C12N 5/06

(52) U.S. Cl. 435/69.1; 435/325; 435/320.1; 530/350; 536/23.5; 530/388.22

(57) ABSTRACT

The present invention is based on sequencing genomic DNA from human chromosome 6 and cDNAs to define the genomic structure of estrogen receptor alpha genes and novel polymorphism/haplotypes in the estrogen receptor gene/protein. Such polymorphism/haplotypes can lead to a variety of disorders that are mediated/modulated by a variant estrogen receptor, such as a susceptibility to cancer, osteoporosis, cardiovascular disorder, etc. Based on this sequencing approach, the present invention provides genomic nucleotide sequences, cDNA sequences, amino acid sequences and sequence polymorphism/haplotypes in the ESR-alpha genes, methods of detecting these sequences/polymorphism/haplotypes in a sample, methods of determining a risk of having or developing a disorder mediated by a variant estrogen receptor and methods of screening for compounds used to treat disorders mediated by a variant estrogen receptor.

### RELATED APPLICATIONS

[0001] The present application claims priority to applications U.S. Ser. Nos. 60/160,626, filed Oct. 20, 1999 (Atty. Docket CL000119-PROV); 60/183,756, filed Feb. 22, 2000 (Atty. Docket CL000258-PROV); 09/692,414, filed Oct. 20, 2000 (Atty. Docket CL000258); 09/768,184, filed Jan. 24, 2001 (Atty. Docket CL000258CIP); 09/804,076, filed Mar. 13, 2001 (Atty. Docket CL000258CI2); and 09/826,314, filed Apr. 5, 2001 (Atty. Docket CL000258CI3).

### FIELD OF THE INVENTION

[0002] The present invention is in the field of disease detection and therapy. The present invention specifically provides the identification of previously unknown nucleic acid/amino acid polymorphisms within the estrogen receptor alpha gene (ESR-alpha) and the genomic sequence of this gene for use in the development of diagnostics and therapies for diseases and disorders mediated/modulated by the estrogen receptor.

### BACKGROUND OF THE INVENTION

[0003] Estrogen Receptor

[0004] The human estrogen receptor alpha belongs to the nuclear hormone receptor family. Nuclear hormone receptors are a family of hormone-activated transcription factors that can initiate or enhance the transcription of genes containing specific hormone response elements.

[0005] The ER protein consists of 595 amino acids with a molecular weight of 66 kDa, 8 transcribed exons, with six different functional domains. Two of those domains are highly conserved in the primary sequence of members of the nuclear hormone receptor superfamily. One of the domains, the DNA binding domain (DBD), contains two zinc fingers that mediate receptor binding to hormone response elements in the promoters of hormone-responsive genes. In the C-terminal region, the hormone-binding domain (HBD) contains two regions of sequence homology with other hormone receptors and gives hormone specificity and selectivity. The human ER-alpha gene is located in chromosome 6q.25.1.

[0006] Estrogen receptors, like other steroid receptors, are transcription factors that are activated upon binding to steroids (estradiol) or steroid analogs such as tamoxifen. Upon activation the receptors dimerize to form homodimers or heterodimers that bind to estrogen receptor elements (EREs) located in the promoter region of estrogen-activated genes and coordinate transcription by interacting with host co-activators.

[0007] Role of Estrogen in Cardiovascular Disease

[0008] Heart disease is the leading cause of mortality in women, a fact that is under appreciated by both women and physicians. One in 9 women aged 45-65 have some form of cardiovascular disease and the number increases to 1 in 3 after age 65. Each year, 240,000 U.S. women die from heart disease, and nearly 90,000 die of stroke. Moreover, approximately 44% die within one year of suffering a heart attack, compared with 26% of men (Warren M P and Kulak J Clin Obs Gyn 1998 41(4):976-987).

[0009] Estrogens exert a wide range of physiological effects on a large variety of cell types. For example, they regulate cell growth and apoptosis and a myriad of functions related to reproduction. There are two types of estrogen receptors, alpha and beta. Blood vessels and bone contain beta receptors, the liver has alpha receptors, and both alpha and beta receptors are found in the central nervous system. The interaction of these different receptor sites influences the biological effects of estrogen and selective estrogen receptor modulators (SERMs), such as raloxifene. The binding patterns dictate whether an estrogen or a SERM acts as an estrogen agonist or an antagonist (Mendelsohn M E and Karas R H New Engl J Med 1999, 340(23):1801-1811 ;Grese T A and Dodge J A Curr Pharm Design 1998, 4:71-92). Tissue-specific relationships exist between SERMs and the receptor binding sites. Estrogens also increase high-density lipoprotein cholesterol levels, decrease low-density lipoprotein cholesterol, and decrease plasminogen-activating inhibitor levels (Meisler J G Jour Women's Health 1999, 8(1):51-57). All estrogens require cellular receptors for their expression. In general, estrogen receptors are ligand-inducible transcription factors, which regulate the expression of target genes after hormone binding (Faustini-Fustini et al. Eur J Endocrin 1999, 140:111-129). Estrogen may also have important effects on the vascular wall. Estradiol and progesterone receptors have been identified in arterial endothelial and smooth muscle cells (Campisi D et al. Int J Tiss React 1987, IX(5):393-398). Estrogens act on the wall of the artery to relax vascular smooth muscle and to decrease vascular resistance. The mechanism appears to be through stimulation of endothelial-derived relaxing factors and an endogenous nitrate (Warren M P and Kulak J Clin Obs Gyn 1998 41(4):976-987). The relaxation induced by 17B-estradiol may play an important role in the regulation of coronary tone, which reduces the risk of coronary disease in postmenopausal women. The production of nitric oxide is mediated by the estrogen receptor, because when the receptor is blocked by an antiestrogen agent, nitric oxide is suppressed.

[0010] Several studies have shown that estrogen therapy reduces the risk of heart disease by up to 50% (most recently reviewed by Mendelsohn M E and Karas R H New Engl J Med 1999, 340(23):1801-1811;Rich-Edwards J W N Engl J Med, 1995, 332:1758-1765; Gerhard M, Ganz P, Circulation, 1995, 92:5-8; Grodstein F, et al N Engl J Med 1997, 336:1769-75; Chasen-Taber L and Stampfer M J Ann of Int Med, 1998, 128:467-477; Warren M P and Kulak J Clin Obstet Gyn 1998, 41(4):976-987). Loss of estrogen may be one of the most important factors in the development of cardiovascular disease in women.

[0011] While there is no direct evidence that estrogen prevents atherogenesis, considerable epidemiologic evidence exists that suggests that estrogens may have some benefit in reducing cardiovascular disease: (1) In all age groups, women have a lower incidence of cardiovascular disease than do men; (2) women who undergo a premature surgical menopause and do not take estrogens are twice as likely to have cardiovascular disease are age-matched premenopausal controls; (3) postmenopausal women who use estrogens have a significantly lower incidence of cardiovascular disease compared with those who do not; and (4) women with coronary artery disease detected by angiography have a higher survival rate if they are estrogen users.

[0012] In recent years, reports of favorable effects of estrogen therapy on cardiovascular morbidity and mortality have led to enthusiasm for widespread use of estrogens by postmenopausal women (Meinertz T Herz 1997, 22: 151-157). Guidelines for estrogen therapy issued by the American College of Physicians include the statement “Women who have coronary heart disease are likely to benefit from hormone therapy.”

[0013] More than 30 prospective studies and 13 case controlled studies have examined the effect of estrogen replacement therapy on cardiovascular incidence or prevalence and all cause mortality (Stampfer M J et al. New Engl J Med 1991, 325:756-62; Grady D et al. Ann Intern Med 1992, 117:1016-37). The majority of these studies showed lower morbidity and mortality from coronary heart disease among users of postmenopausal estrogens than among non-users. Specifically, they have shown that coronary artery disease in estrogen takers is approximately 50% that in women who do not take estrogen. Overall, the bulk of the evidence strongly supports a protective effect of estrogens yielding a relative risk of 0.56 (95% confidence interval 0.50-0.61). However, a “healthy woman selection bias” is present in these studies and potentially may confound these results (estrogen takers have better weight control, exercise more, and smoke less than women who are not prescribed estrogen). Moreover, other biases such as estrogen takers tend to have higher education, higher income, etc., are confounding these epidemiologic studies (Abrams J Clin Cardiol 1998, 21:218-222).

[0014] Since the earlier observational trials were not randomized, it is believed by many that as much as 25% of this 50% reduction in risk is due to these various methodological biases (Barrett-Conner E and Grady D 1998, Ann Rev Public Health 19:55-72). Recently, 2 meta-analyses estimated the reduction in coronary heart disease associated with estrogen use to be in the range of 35 to 44%, respectively (Grodstein F and Stampfer M J Prog Cardiol Dis 1995, 38: 199-210; Barrett-Conner E and Grady D 1998, Annu Rev Public Health 19:55-72). Recent studies are exploring the issue of opposed vs unopposed estrogen, because of a documented increased risk for uterine cancer in women with an intact uterus who are taking estrogen alone. The new lines of evidence are suggesting that women taking estrogen plus a progestin (usually a medroxyprogesterone acetate) do not receive an equivalent benefit from the cardioprotective effects compared to women taking estrogen alone (Hulley S et al 1998 JAMA 280:605-613; Abrams J Clin Cardiol 1998, 21:218-222).

[0015] The loss of estrogen at menopause is associated with a 6% decline in HDL cholesterol levels and a 5% rise in LDL cholesterol levels, which may explain the higher cardiovascular disease rate among postmenopausal women compared with premenopausal women. The lower incidence of cardiovascular disease among postmenopausal women who take estrogen may be explained in part by the resultant 15% to 19% decrease in LDL cholesterol levels and the 16% to 18% increase in HDL cholesterol levels (JAMA 1995, 273:199-208). The PEPI (Postmenopausal Estrogen/Progestin Intervention, a randomized, double-blind placebo-controlled trial, showed that HDL cholesterol levels rose significantly more in women assigned to estrogen alone than in women assigned the combined estrogen (JAMA 1995, 273:199-208). Recent non-human primates studies substantiate these findings (Clarkson T B Lab An Sci 1998, 48(6):569-72). Statistical modeling of the effect of estrogen on lipid profiles indicates that 25-50% of the apparent cardioprotection due to estrogen is mediated by favorable changes in HDL-cholesterol (Bush T L et al. 1987 Circulation 75:1102-9; Gruchow H W et al. 1988 Am Heart J 115:954-63).

[0016] Estrogen replacement therapy is not without risk. For years, studies have shown a 3-4-fold increased risk of venous thromboembolism (VTE) in users of oral contraceptives compared to non-users (Weiss G Am J Obstet Gynecol 1999 180:S295-301). One study has shown that intrinsic coagulation factors play a significant role in oral contraceptive-associated VTE (Vandenbroucke J P et al. Lancet 1994 344:1453-7; Rosing J et al. Br J Haematol 1997, 97:233-238). The Factor V Leiden mutation increases risk of VTE 5-10 fold in non users, but 30-fold in third-generation oral contraceptive users. Combined estrogens appear to induce resistance to the body's natural anticoagulation system (APC). Heterozygotes for the Factor V Leiden mutation who take oral contraceptives develop APC resistance as high as that seen in women who are homozygous.

[0017] Estrogens increase the risk of endometrial carcinoma approximately 6-fold, an effect that is eliminated, for the most part, by the addition of progestins (Barrett-Conner E and Grady D 1998, Ann Rev Public Health 19:55-72). Controversy continues over whether estrogen replacement increases the risk of breast cancer, but some studies indicate risk is elevated by as much as 30%. (Greendale G A et al. Lancet 1999, 353:571-80).

[0018] A number of prospective randomized studies designed to definitely establish whether estrogen replacement therapy reduces the risk of cardiovascular disease in women and whether it increases the risk of breast cancer, are underway. One recently completed trial (HERS—Heart and Estrogen/progestin Replacement Study) compared continuous combined estrogen plus medroxyprogesterone acetate to placebo in 2700 women with pre-existing coronary disease (Hully S et al. 1998 JAMA 280(7):605-13). Compared to controls, the intervention group had significantly more heart disease events in year one of the trial, but significantly fewer events in years 4 and 5 of the trial. Moreover, a significant increase in the rate of thromboembolic events occurred in the early years of the study in women taking hormones. Based on these results, hormone replacement therapy is not recommended for secondary prevention of heart disease.

[0019] Two other large, ongoing clinical trials on primary prevention of cardiovascular disease using estrogens are underway. The Women's Health Initiative, due to be completed in 2005 and a U.K. study called WIS-DOM, due to be completed in 2010, should shed new light on the protective effects of estrogen on cardiovascular disease (Meisler J G Jour Women's Health 1999, 8(1):51-5).

[0020] In summary, ongoing research suggests that estrogen replacement therapy, particularly involving recently formulated designer estrogens or SERMs, may have beneficial effects on the cardiovascular system as well as bone, without the untoward effects on breast and endometrial tissue. Caution still needs to be observed, nonetheless. Women who take estrogens are, on average, better educated, healthier, have higher incomes and have better access to health care. These differences rather than the estrogens may account for much of the lower risk of heart disease.

[0021] For postmenopausal women without frank disease, estrogen replacement therapy appears to have a beneficial effect when one considers the magnitude, consistency, and biological plausibility of the data. For women with pre-existing disease, questions remain as to the safety and efficacy of exogenous estrogens as protective agents against cardiovascular disease.

[0022] Estrogen and autoimmune diseases

[0023] A. Systemic Lupus Erythematosus

[0024] There is a widely held view that estrogens play a role in Systemic lupus erythematosus because:

[0025] 1. Women of child bearing age are nine times more likely to develop systemic lupus erythematosus than men. Prior to pubescence the rate is three fold higher in females, while post menopausal women have an equal chance of developing SLE as aged matched males. Many studies have been done that show that the reason for the differences in the sexes is probably estrogen related (Lahita R. G., 1986: Springer Seminars in Immunopathology 9, 305-314; Krammer, G. M. and Tsokos, G. C., 1998 Clinical Immunology and Immunopathology 89: 192-195; Rider at al., 1998 Clinical Immunology and Immunopathology 89: 171-180).

[0026] Clues to the role of estrogens in SLE came from studies that concluded that oral contraceptives adversely affected the morbidity of this illness (Buton, J. P., 1996 Ann. Med. Interne, 147:259-264; Julkunen, 1991: Scan. J. Rheumatol. 20:427-433).

[0027] 2. Patients with Klinefelter syndrome (XXY), have been reported with SLE (Stem et al., 1977: Arthritis and Rheumatism 20:18-22).

[0028] 3. Patients with SLE have anti-estrogen antibodies (Feldman, 1987: Biochem. Biophys. Acta, 145:1342-1348: Bucala et al., 1987: Clin. Exp. Immunol. 67:167-175)

[0029] In the past, oral contraceptives have been shown to cause flare ups of SLE, their use was discouraged in women with SLE, while the current thinking is that the lower dose birth control pills are safe for SLE patients (Julkunen H A Scand J Rheumatol 1991;20(6):427-33). As well hormone replacement therapy is considered safe for SLE patients (Mok et al., Scand J Rheumatol 1998;27(5):342-6: Kreidstein et al., 1997, J Rheumatol 1997 November;24(11):2149-52)

[0030] 4. The estrogen antagonist tamoxofin seems to improve the course of the disease (Sthoeger, 1997, Ann N Y Acad Sci 1997 Apr 5;815:367-8: Sthoeger, 1994, J Rheumatol 1994 Dec;21(12):2231-8).

[0031] B. Estrogen, Rheumatoid Arthritis (RA) and osteoarthritis

[0032] The literature surrounding the involvement of estrogens in Rheumatoid arthritis is less clear than with osteoarthritis. Epidemiological studies suggests that RA is influenced by female sex hormones, by one study states that the use of oral contraceptives may postpone the onset of RA, but that estrogens alone no not alleviate the symptoms of RA (Bijlsma Am J Reprod Immunol 1992 Oct-Dec;28(3-4):231-4). Adjuvant oestrogen treatment does increase bone mineral density in postmenopausal women with RA, and may protect against osteophoresis which is often a complication of RA (van den Brink: Ann Rheum Dis 1993 Apr;52(4):302-5). While the study mentioned above indicated that estrogens did not alleviate RA symptoms, another study concluded that adjuvant estrogen therapy did not even improve the symptoms. One polymorphism has been reported in the estrogen receptor that seems to be associated with the age of onset of RA (Ushiyama Ann Rheum Dis January 1999; 58(1):7-10)

[0033] Osteoarthritis on the other hand is less prevalent in postmenopausal women who take estrogen replacement therapy (ERT) (Felson Curr Opin Rheumatol 1998 May; 10(3):269-72) suggesting that ERT may be beneficial in preventing osteoarthritis.

[0034] C. Estrogen and Osteoporosis

[0035] Osteoporosis is a metabolic bone disorder that leads to bone fragility and subsequent risk of fracture. Treatment for postmenopausal women with osteoporesis includes hormone replacement, in particular estrogen. Estrogen has shown to reduce the incidence of bone loss and fractures (Weiss et al., N Engl J Med 1980 Nov 20;303(21):1195-8 :Paganini-Hill et al., Ann Intern Med 1981 Jul;95(1):28-31: Ettinger et al., Ann Intern Med 1985 Mar;102(3):319-24)

[0036] Further, polymorphisms in the estrogen receptor have been associated with bone loss in both humans and mice.(Kobayashi J Bone Miner Res 1996 Mar;11(3):306-11: Kurabayashi Am J Obstet Gynecol 1999 May; 180(5):1115-20; Deng Hum Genet 1998 Nov; 103(5):576-85)

[0037] Estrogens and Cognitive function

[0038] Compared with men, women are at greater risk of developing Alzheimer's disease. Several studies show that women who take estrogen after menopause have a lower incidence of Alzheimer's disease. Among women with Alzheimer's, those taking estrogen suffer less severe symptoms and slower mental deterioration. The duration of estrogen use also seems to be important in reducing risk. Women with a history of long-term use (more than 10 years) had the lowest risk. But even women who took estrogen for a short time also benefited.

[0039] Estrogen and breast cancer

[0040] The major risk factors for the development of breast cancer are sex, age, family history of breast cancer, age of menarche, age at first full-term pregnancy, and age of menopause. All of these factors, with the exception of family history, have been shown to be directly associated with lifetime exposure to estrogen, increased hormone exposure being associated with increased risk of developing breast cancer. The increased cancer risk is believed to be caused by an estrogen receptor-mediated proliferative response in cells of the mammary epithelium.

[0041] Tamoxifen, an estrogen receptor antagonist, has been shown to be an effective agent for both the prevention and treatment of breast cancer. Using immunohistochemical methods, it is possible to classify breast tumors as being estrogen receptor positive or negative, depending upon the amount of estrogen receptor protein expressed in the tissue. Estrogen receptor positive tumors are more likely to respond to treatment with tamoxifen than estrogen receptor negative tumors. Pre-menopausal women are more likely to develop estrogen receptor negative breast cancers than are post-menopausal women.

[0042] Mutations altering the structure and function of the estrogen receptor have been described in primary breast tumors or breast cancer cell lines. It is not clear however whether these changes are primary (and involved in the processes leading to carcinogenesis) or secondary (and a consequence of genetic instability in cancer tissues). In addition to these somatic mutations, some studies have pointed to a possible association between inherited DNA sequence changes and the development of breast cancer, but these studies are also controversial.

[0043] Further evidence for the role of estrogen receptors in breast cancer comes from the recent finding that the gene BRCA1, which when inherited in a mutant form predisposes to the development of breast cancer, inhibits estrogen receptor signaling.

[0044] Estrogens and endometrial cancer

[0045] Carcinoma of the endometrium is the most common pelvic malignancy in women, however because in approximately 75% of cases it is confined to the body of the uterus at the time of diagnosis, it can usually be cured by hysterectomy. Unopposed exposure of endometrial cells to estrogens dramatically increases the chance of developing this form of uterine cancer and it is for this reason that hormone replacement therapy consisting solely of estrogen should not be given to women with intact uteri. Cyclical or continuous co-administration of progesterone serves to prevent excessive proliferation of endometrial cells, reducing the risk of endometrial cancer in post-menopausal women receiving estrogen as part of hormone replacement therapy regimens.

[0046] The majority of cases of endometrial cancers express estrogen receptor and, in general, estrogen responsive tumors have a favorable prognosis. Acquired (somatic) mutations have been described in up to 8.5% of cases, however the role of these mutations in the development and progression of endometrial cancer is uncertain at present.

[0047] Although it remains somewhat controversial, studies suggest that use of tamoxifen may increase the chance of developing endometrial cancer. This may be because, in addition to its role in estrogen receptor blockade, tamoxifen has partial receptor agonist activity and results in low-grade induction of estrogen responsive genes that induce endometrial proliferation.

[0048] Given the involvement of the estrogen receptor in mediating/modulating various disorders, it is critical to identify sequence polymorphisms in the estrogen receptor and to correlate these with disease states, therapeutic effectiveness and the like. The present invention advances the art by providing a variety of previously unidentified polymorphisms in the ESR-alpha protein.

[0049] SNPs

[0050] The genomes of all organisms undergo spontaneous mutation in the course of their continuing evolution, generating variant forms of progenitor sequences (Gusella, Ann. Rev. Biochem. 55, 831-854 (1986)). The variant form may confer an evolutionary advantage or disadvantage relative to a progenitor form or may be neutral. In some instances, a variant form confers a lethal disadvantage and is not transmitted to subsequent generations of the organism. In other instances, a variant form confers an evolutionary advantage to the species and is eventually incorporated into the DNA of many or most members of the species and effectively becomes the progenitor form. Additionally, the effect of a variant form may be both beneficial and detrimental, depending on the circumstances. For example, a heterozygous sickle cell mutation confers resistance to malaria, but a homozygous sickle cell mutation is usually lethal. In many instances, both progenitor and variant form(s) survive and co-exist in a species population. The coexistence of multiple forms of a sequence gives rise to polymorphisms, such as SNPs.

[0051] The reference allelic form is arbitrarily designated and may be, for example, the most abundant form in a population, or the first allelic form to be identified, and other allelic forms are designated as alternative, variant or polymorphic alleles. The allelic form occurring most frequently in a selected population is sometimes referred to as the “wild type” form.

[0052] Approximately 90% of all polymorphisms in the human genome are single nucleotide polymorphisms (SNPs). SNPs are single base pair positions in DNA at which different alleles, or alternative nucleotides, exist in some population. The SNP position, or SNP site, is usually preceded by and followed by highly conserved sequences of the allele (e.g., sequences that vary in less than 1/100 or 1/1000 members of the populations). An individual may be homozygous or heterozygous for an allele at each SNP position. As defined by the present invention, the least frequent allele at a SNP position can have any frequency that is less than the frequency of the more frequent allele, including a frequency of less than 1% in a population. A SNP can, in some instances, be referred to as a “cSNP” to denote that the nucleotide sequence containing the SNP is an amino acid coding sequence.

[0053] A SNP may arise due to a substitution of one nucleotide for another at the polymorphic site. Substitutions can be transitions or transversions. A transition is the replacement of one purine nucleotide by another purine nucleotide, or one pyrimidine by another pyrimidine. A transversion is the replacement of a purine by a pyrimidine, or vice versa. A SNP may also be a single base insertion/deletion variant (referred to as “indels”). A substitution that changes a codon coding for one amino acid to a codon coding for a different amino acid is referred to as a non-synonymous codon change, or missense mutation. A synonymous codon change, or silent mutation, is one that does not result in a change of amino acid due to the degeneracy of the genetic code. A nonsense mutation is a type of non-synonymous codon change that results in the formation of a stop codon, thereby leading to premature termination of a polypeptide chain and a defective protein.

[0054] SNPs, in principle, can be bi-, tri-, or tetra-allelic. However, tri- and tetra-allelic polymorphisms are extremely rare, almost to the point of non-existence (Brookes, Gene 234 (1999) 177-186). For this reason, SNPs are often referred to as “bi-allelic markers”, or “di-allelic markers”.

[0055] Causative SNPs are those SNPs that produce alterations in gene expression or in the expression or function of a gene product, and therefore are most predictive of a possible clinical phenotype. One such class includes SNPs falling within regions of genes encoding a polypeptide product, i.e. cSNPs. These SNPs may result in an alteration of the amino acid sequence of the polypeptide product (i.e., non-synonymous codon changes) and give rise to the expression of a defective or other variant protein. Furthermore, in the case of nonsense mutations, a SNP may lead to premature termination of a polypeptide product. Such variant products can result in a pathological condition, e.g., genetic disease. Examples of genes in which a polymorphism within a coding sequence gives rise to genetic disease include sickle cell anemia and cystic fibrosis. Causative SNPs do not necessarily have to occur in coding regions; causative SNPs can occur in any region that can ultimately affect the expression and/or activity of the protein encoded by the nucleic acid. Such gene areas include those involved in transcription, such as SNPs in promoter regions, in gene areas involved in transcript processing, such as SNPs at intron-exon boundaries that may cause defective splicing, or SNPs in mRNA processing signal sequences such as polyadenylation signal regions. For example, a SNP may inhibit splicing of an intron and result in mRNA containing a premature stop codon, leading to a defective protein. Consequently, SNPs in regulatory regions can have substantial phenotypic impact.

[0056] Some SNPs that are not causative SNPs nevertheless are in close association with, and therefore segregate with, a disease-causing sequence. In this situation, the presence of the SNP correlates with the presence of, or susceptibility to, the disease. These SNPs are invaluable for diagnostics and disease susceptibility screening.

[0057] Clinical trials have shown that patient response to treatment with pharmaceuticals is often heterogeneous. Thus there is a need for improved approaches to pharmaceutical agent design and therapy. SNPs can be used to help identify patients most suited to therapy with particular pharmaceutical agents (this is often termed “pharmacogenomics”). Pharmacogenomics can also be used in pharmaceutical research to assist the drug selection process. (Linder et al. (1997), Clinical Chemistry, 43, 254; Marshall (1997), Nature Biotechnology, 15, 1249; International Patent Application WO 97/40462, Spectra Biomedical; and Schafer et al. (1998), Nature Biotechnology, 16, 3.).

[0058] Population Studies

[0059] Population Genetics is the study of how Mendel's laws and other genetic principles apply to entire populations. Such a study is essential to a proper understanding of evolution because, fundamentally, evolution is the result of progressive change in the genetic composition of a population. Population genetics thus seeks to understand and to predict the effects of such genetic phenomena as segregation, recombination, and mutation; at the same time, population genetics must take into account such ecological and evolutionary factors as population size, patterns of mating, geographic distribution of individuals, migration and natural selection.

[0060] Ideally, one would wish to know how to describe the types and frequencies of genes in a population, to explain how the population's genetic composition came to be the way it is, and to predict how the population would change as a result of natural selection or as a result of artificial selection.

[0061] In order to explain many of those issues it is important to understand the existing relation between loci denominated: Linkage.

[0062] Linkage is the coinheritance of two or more nonallelic genes because their loci are in close proximity on the same chromosome, such that after meiosis they remain associated more often than the 50% expected for unlinked genes. During meiosis, there is a physical crossing over, it is clear that during the production of germ cells there is a physical exchange of maternal and paternal genetic contributions between individual chromatids. This exchange necessarily separates genes in chromosomal regions that were contiguous in each parent and, by mixing them with retained linear order, results in “recombinants”. The process of forming recombinants through meiotic crossing-over is an essential feature in the reassortment of genetic traits and is central to understanding the transmission of genes.

[0063] Recombination generally occurs between large segments of DNA. This means that contiguous stretches of DNA and genes are likely to be moved together. Conversely, regions of the DNA that are far apart on a given chromosome are likely to become separated during the process of crossing-over.

[0064] It is possible to use molecular markers to clarify the recombination events that take place during meiosis. Some markers as (CA)n repeats of different lengths are dispersed throughout human DNA and there is little selective pressure in their lengths are used as position markers and regional identifying characters along chromosomes. Those markers can be used to distinguish paternally derived from maternally derived gene regions.

[0065] Other markers are Single Nucleotide Polymorphism (SNP), those are biallelic markers, also used to analyzed the transmission of those markers to offspring.

[0066] The pattern of a set of markers along a chromosome is referred to as a “Haplotype”. Therefore sets of alleles on the same small chromosomal segment tend to be transmitted as a block through a pedigree. By analyzing the haplotypes in a series of offspring of parents whose haplotypes are known, it is possible to establish which parental segment of which chromosome was transmitted to which child. When not broken up by recombinations, haplotypes can be treated for mapping purposes as alleles at a single highly polymorphic locus.

[0067] The existance of a preferential occurrence of a disease gene in association with specific alleles of linked markers is called “Linkage Disequilibrium”(LD). This sort of disequilibrium generally implies that most of the disease chromosomes carry the same mutation and the markers being tested are quite close to the disease gene. For example, there is considerable linkage disequilibrium across the entire HLA locus. The A3 allele is in LD with the B7 and B14 alleles, and as a result B7 and B14 are also highly associated with hemochromatosis. Thus, HLA typing alone can significantly alter the estimate of risk for hemochromatosis, even if other family members are not available for formal linkage analysis. As a result, using a combination of several markers surrounding the presumptive location of the gene, a haplotype can be determined for affected and unaffected family members.

[0068] SNP-Based Association Analysis and Linkage Disequilibrium Mapping

[0069] SNPs are useful in association studies for identifying particular SNPs, or other polymorphisms, associated with pathological conditions, such as breast cancer. Association studies may be conducted within the general population and are not limited to studies performed on related individuals in affected families (linkage studies). An association study using SNPs involves determining the frequency of the SNP allele in many patients with the disorder of interest, such as breast cancer, as well as controls of similar age and race. The appropriate selection of patients and controls is critical to the success of SNP association studies. Therefore, a pool of individuals with well-characterized phenotypes is extremely desirable. For example, blood pressure and heart rate can be correlated with SNP patterns in hypertensive individuals in whom these physiological parameters are known in order to find associations between particular SNP genotypes and known phenotypes. Significant associations between particular SNPs or SNP haplotypes and phenotypic characteristics can be determined by standard statistical methods. Association analysis can either be direct or LD based. In direct association analysis, causative SNPs are tested that are candidates for the pathogenic sequence itself.

[0070] In LD based SNP association analysis, random SNPs are tested over a large genomic region, possibly the entire genome, in order to find a SNP in LD with the true pathogenic sequence or pathogenic SNP. For this approach, high density SNP maps are required in order for random SNPs to be located close enough to an unknown pathogenic locus to be in linkage disequilibrium with that locus in order to detect an association. SNPs tend to occur with great frequency and are spaced uniformly throughout the genome. The frequency and uniformity of SNPs means that there is a greater probability, compared with other types of polymorphisms such as tandem repeat polymorphisms, that a SNP will be found in close proximity to a genetic locus of interest. SNPs are also mutationally more stable than tandem repeat polymorphisms, such as VNTRs. LD-based association studies are capable of finding a disease susceptibility gene without any a priori assumptions about what or where the gene is.

[0071] Currently, however, it is not feasible to do SNP association studies over the entire human genome, therefore candidate genes associated with breast cancer are targeted for SNP identification and association analysis. The candidate gene approach uses a priori knowledge of disease pathogenesis to identify genes that are hypothesized to directly influence development of the disease. The candidate gene approach may focus on a gene that is directly targeted by a drug used to treat the disorder. To discover SNPs associated with an increased susceptibility to breast cancer, candidate genes can be selected from systems physiologically implicated in the disease pathway. SNPs found in these genes are then tested for statistical association with disease in individuals who have the disease compared with appropriate controls. The candidate gene approach has the advantages of drastically reducing the number of candidate SNPs, and the number of individuals, that need to be typed, compared with LD-based association studies of random SNPs over large areas of, or complete, genomes. Furthermore, in the candidate gene approach, no assumptions are made about the extent of LD over any particular area of the genome.

[0072] Combined with the use of a high density map of appropriately spaced, sufficiently informative SNP markers, association studies, including linkage disequilibrium-based genome wide association studies, will enable the identification of most genes involved in complex disorders, such as breast cancer. This will enhance the selection of candidate genes most likely to contain causative SNPs associated with a particular disease. All of the SNPs disclosed by the present invention can be employed as part of genome-wide association studies or as part of candidate gene association studies.

[0073] The present invention advances the state of the art and provides commercially useful embodiments by providing previously unidentified SNPs in the estrogen receptor genes.

### SUMMARY OF THE INVENTION

[0074] The present invention is based on sequencing genomic DNA from human chromosome 6 and cDNAs to define the genomic structure of estrogen receptor alpha genes, novel polymorphisms in the estrogen receptor gene/protein and previously unknown haplotypes. Such polymorphisms/haplotypes can lead to a variety of disorders that are mediated/modulated by a variant estrogen receptor, such as a susceptibility to cancer, osteoporosis, cardiovascular disorders, etc. Based on this sequencing approach, the present invention provides genomic nucleotide sequences, cDNA sequences, amino acid sequences, sequence polymorphisms in the ESR-alpha gene, haplotypes of these polymorphisms, methods of detecting these sequences/polymorphisms in a sample, methods of determining a risk of having or developing a disorder mediated by a variant estrogen receptor and methods of screening for compounds used to treat disorders mediated by a variant estrogen receptor.

### DESCRIPTION OF THE FIGURES

[0075] FIG. 1. Complete genomic sequence of the estrogen receptor alpha gene.

[0076] FIG. 2. Sequence polymorphisms found in the ESR-alpha genomic DNA (nucleotide position is based on the sequence provided in FIG. 1.)

[0077] (a) SNPs in Liverpool clinical tissue samples.

[0078] (b) SNPs in Coriell Diversity panels.

[0079] (c) SNPs in Liverpool Control Population

[0080] (d) PCR primers.

[0081] (e) Sequencing primers.

[0082] FIG. 3. Amino acid sequence of the estrogen receptor alpha protein.

[0083] FIG. 4. Estrogen Receptor Haplotypes (See Haplotype Section).

[0084] (a) Liverpool samples from 48 patients, and each patient had a tumor and blood sample typed. Coriell samples were control.

[0085] (b) The non-singleton haplotype data fitted to a neighbor-joining tree (L is Liverpool sample).

[0086] FIG. 5. The domain structure of the ESR1 protein and the positions of the SNPs disclosed herein.

[0087] FIG. 6. The distribution and frequency of many of the SNPs of the present invention.

[0088] FIG. 7. A graphic representation of the human ESR1 locus.

[0089] (a) Complete structure of the human estrogen receptor alpha (ERα). Exons are represented by filled boxes and introns by horizontal lines.

[0090] (b) Order and names of contigs used to complete the genomic sequence. GA numbers represent Celera contig numbers. Research Genetics BAC clones are represented by standard plate and well numbering.

[0091] FIG. 8. ESR-alpha SNPs Genotyping Results a) in Coriell Samples, b) in Liverpool Samples (T=tumor sample, B=blood sample, LC=Liverpool controls), c) in Liverpool Control sample

[0092] FIG. 9. ESR-alpha exons with SNPs. (see FIG. 2 for “N”, “C”, “I”, “A”, “S” representations). Underlined sequences indicate the primer sequences.

### DETAILED DESCRIPTION OF THE INVENTION

[0093] General Description

[0094] The present invention is based on sequencing genomic DNA from human chromosome 6 and cDNAs to define the genomic structure of estrogen receptor alpha genes and novel polymorphisms and haplotypes in the estrogen receptor gene/protein. Such polymorphisms/haplotypes can lead to a variety of disorders that are mediated/modulated by a variant estrogen receptor, such as a susceptibility to cancer, osteoporosis, cardiovascular disorders, etc. Based on this sequencing approach, the present invention provides genomic nucleotide sequences, cDNA sequences, amino acid sequences and sequence polymorphisms/haplotypes in the ESR-alpha gene, methods of detecting these sequences/polymorphisms/haplotypes in a sample, methods of determining a risk of having or developing a disorder mediated by a variant estrogen receptor and methods of screening for compounds used to treat disorders mediated by a variant estrogen receptor.

[0095] Isolated SNP-Containing Nucleic Acid Molecules

[0096] The present invention provides isolated nucleic acid molecules that contain one or more SNPs disclosed by the present invention. The present invention further provides isolated nucleic acid molecules that encode the variant protein. Such nucleic acid molecules will consist of, consist essentially of, or comprise one or more SNPs of the present invention. The nucleic acid molecule can have additional nucleic acid residues, such as nucleic acid residues that are naturally associated with it or heterologous nucleotide sequences.

[0097] As used herein, an “isolated” SNP-containing nucleic acid molecule is one that contains a SNP of the present invention and is separated from other nucleic acid present in the natural source of the nucleic acid. Generally, the isolated SNP-containing nucleic acid, as used herein, will be comprised of one or more SNP positions disclosed by the present invention with flanking nucleotide sequence on either side of the SNP positions. Preferably the flanking sequence is up to about 300 bases, 100 bases, 50 bases, 30 bases, 15 bases, 10 bases, or 4 bases on either side of a SNP position for detection reagents or as long as the entire protein encoding sequence if it is to be used to produce a protein containing the coding variants disclosed in Figures. The important point is that the nucleic acid is isolated from remote and unimportant flanking sequences and is of appropriate length such that it can be subjected to the specific manipulations or uses described herein such as recombinant expression, preparation of probes and primers for the SNP position, and other uses specific to the SNP-containing nucleic acid sequences.

[0098] Moreover, an “isolated” nucleic acid molecule, such as a cDNA molecule containing a SNP of the present invention, can be substantially free of other cellular material, or culture medium when produced by recombinant techniques, or chemical precursors or other chemicals when chemically synthesized. However, the nucleic acid molecule can be fused to other coding or regulatory sequences and still be considered isolated. For example, recombinant DNA molecules contained in a vector are considered isolated. Further examples of isolated DNA molecules include recombinant DNA molecules maintained in heterologous host cells or purified (partially or substantially) DNA molecules in solution. Isolated RNA molecules include in vivo or in vitro RNA transcripts of the isolated SNP-containing DNA molecules of the present invention. Isolated nucleic acid molecules according to the present invention further include such molecules produced synthetically.

[0099] Isolated SNP-containing nucleic acid molecules can be in the form of RNA, such as mRNA, or in the form DNA, including cDNA and genomic DNA obtained by cloning or produced by chemical synthetic techniques or by a combination thereof. The nucleic acid, especially DNA, can be double-stranded or single-stranded. Single-stranded nucleic acid can be the coding strand (sense strand) or the non-coding strand (anti-sense strand).

[0100] The present invention further provides related nucleic acid molecules that hybridize under stringent conditions to the nucleic acid molecules disclosed herein. As used herein, the term “hybridizes under stringent conditions” is intended to describe conditions for hybridization and washing under which nucleotide sequences encoding a peptide at least 60-70% homologous to each other typically remain hybridized to each other. The conditions can be such that sequences at least about 60%, at least about 70%, or at least about 80%, or at least about 90% or more homologous to each other typically remain hybridized to each other. Such stringent conditions are known to those skilled in the art and can be found in Current Protocols in Molecular Biology, John Wiley & Sons, N.Y. (1989), 6.3.1-6.3.6. One example of stringent hybridization conditions are hybridization in 6×sodium chloride/sodium citrate (SSC) at about 45° C., followed by one or more washes in 0.2×SSC, 0.1% SDS at 50-65° C. Examples of moderate to low stringency hybridization conditions are well known in the art.

[0101] Specific Embodiments

[0102] Peptide Molecules

[0103] The present invention provides nucleic acid sequences that encode variants of the estrogen receptor. These variant molecule/sequences will be referred to herein as the estrogen receptor variants of the present invention, the estrogen receptor proteins of the present invention, or peptides/proteins of the present invention.

[0104] The present invention provides isolated estrogen receptor protein molecules that consist of, consist essentially of or are comprised of the amino acid sequences of the estrogen receptor variant proteins disclosed herein.

[0105] As used herein, a protein or peptide is said to be “isolated” or “purified” when it is substantially free of cellular material or free of chemical precursors or other chemicals. The peptides of the present invention can be purified to homogeneity or other degrees of purity. The level of purification will be based on the intended use. The critical feature is that the preparation allows for the desired function of the peptide, even if in the presence of considerable amounts of other components.

[0106] In some uses, “substantially free of cellular material” includes preparations of the peptide having less than about 30% (by dry weight) other proteins (i.e., contaminating protein), less than about 20% other proteins, less than about 10% other proteins, or less than about 5% other proteins. When the peptide is recombinantly produced, it can also be substantially free of culture medium, i.e., culture medium represents less than about 20% of the volume of the protein preparation.

[0107] The language “substantially free of chemical precursors or other chemicals” includes preparations of the peptide in which it is separated from chemical precursors or other chemicals that are involved in its synthesis. In one embodiment, the language “substantially free of chemical precursors or other chemicals” includes preparations of the estrogen receptor protein having less than about 30% (by dry weight) chemical precursors or other chemicals, less than about 20% chemical precursors or other chemicals, less than about 10% chemical precursors or other chemicals, or less than about 5% chemical precursors or other chemicals.

[0108] The isolated estrogen receptor proteins can be purified from cells that naturally express it, purified from cells that have been altered to express it (recombinant), or synthesized using known protein synthesis methods. For example, a nucleic acid molecule encoding the estrogen receptor protein is cloned into an expression vector, the expression vector introduced into a host cell and the protein expressed in the host cell. The protein can then be isolated from the cells by an appropriate purification scheme using standard protein purification techniques. Many of these techniques are described in detail below.

[0109] Accordingly, the present invention provides proteins that consist of the amino acid sequences summarized in FIG. 1, including one or more of the sequence polymorphisms provided in FIG. 2. A protein consists of an amino acid sequence when the amino acid sequence is the final amino acid sequence of the protein.

[0110] The present invention further provides proteins that consist essentially of the amino acid sequences summarized in FIG. 1, including one or more of the sequence polymorphisms provided in FIG. 2. A protein consists essentially of an amino acid sequence when such an amino acid sequence is present with only a few additional amino acid residues in the final protein.

[0111] The present invention further provides a protein that is comprised of the amino acid sequences summarized in FIG. 1, including one or more of the sequence polymorphisms provided in FIG. 2. A protein is comprised of an amino acid sequence when the amino acid sequence is at least part of the final amino acid sequence of the protein. In such a fashion, the protein can be only the peptide or have additional amino acid molecules, such as amino acid residues (contiguous encoded sequence) that are naturally associated with it or heterologous amino acid residues/peptide sequences. Such a protein can have a few additional amino acid residues or can comprise several hundred or more additional amino acids. A brief description of how various types of these proteins can be made/isolated is provided below.

[0112] The estrogen receptor protein of the present invention can be attached to heterologous sequences to form chimeric or fusion proteins. Such chimeric and fusion proteins comprise a estrogen receptor protein operatively linked to a heterologous protein having an amino acid sequence not substantially homologous to the estrogen receptor protein. “Operatively linked” indicates that the estrogen receptor protein and the heterologous protein are fused in-frame. The heterologous protein can be fused to the N-terminus or C-terminus of the estrogen receptor protein.

[0113] In some uses, the fusion protein does not affect the activity of the estrogen receptor protein per se. For example, the fusion protein can include, but is not limited to, enzymatic fusion proteins, for example beta-galactosidase fusions, yeast two-hybrid GAL fusions, poly-His fusions, MYC-tagged, HI-tagged and Ig fusions. Such fusion proteins, particularly poly-His fusions, can facilitate the purification of recombinant estrogen receptor protein. In certain host cells (e.g., mammalian host cells), expression and/or secretion of a protein can be increased by using a heterologous signal sequence.

[0114] A chimeric or fusion protein can be produced by standard recombinant DNA techniques. For example, DNA fragments coding for the different protein sequences are ligated together in-frame in accordance with conventional techniques. In another embodiment, the fusion gene can be synthesized by conventional techniques including automated DNA synthesizers. Alternatively, PCR amplification of gene fragments can be carried out using anchor primers which give rise to complementary overhangs between two consecutive gene fragments which can subsequently be annealed and re-amplified to generate a chimeric gene sequence (see Ausubel et al., Current Protocols in Molecular Biology, 1992). Moreover, many expression vectors are commercially available that already encode a fusion moiety (e.g., a GST protein). A estrogen receptor protein-encoding nucleic acid can be cloned into such an expression vector such that the fusion moiety is linked in-frame to the estrogen receptor protein.

[0115] Polypeptides often contain amino acids other than the 20 amino acids commonly referred to as the 20 naturally-occurring amino acids. Further, many amino acids, including the terminal amino acids, may be modified by natural processes, such as processing and other post-translational modifications, or by chemical modification techniques well known in the art. Common modifications that occur naturally in polypeptides are described in basic texts, detailed monographs, and the research literature, and they are well known to those of skill in the art. Accordingly, the polypeptides also encompass derivatives or analogs in which a substituted amino acid residue is not one encoded by the genetic code, in which a substituent group is included, in which the mature polypeptide is fused with another compound, such as a compound to increase the half-life of the polypeptide (for example, polyethylene glycol), or in which the additional amino acids are fused to the mature polypeptide, such as a leader or secretory sequence or a sequence for purification of the mature polypeptide or a pro-protein sequence.

[0116] Known modifications include, but are not limited to, acetylation, acylation, ADP-ribosylation, amidation, covalent attachment of flavin, covalent attachment of a heme moiety, covalent attachment of a nucleotide or nucleotide derivative, covalent attachment of a lipid or lipid derivative, covalent attachment of phosphotidylinositol, cross-linking, cyclization, disulfide bond formation, demethylation, formation of covalent crosslinks, formation of cystine, formation of pyroglutamate, formylation, gamma carboxylation, glycosylation, GPI anchor formation, hydroxylation, iodination, methylation, myristoylation, oxidation, proteolytic processing, phosphorylation, prenylation, racemization, selenoylation, sulfation, transfer-RNA mediated addition of amino acids to proteins such as arginylation, and ubiquitination.

[0117] Such modifications are well-known to those of skill in the art and have been described in great detail in the scientific literature. Several particularly common modifications, glycosylation, lipid attachment, sulfation, gamma-carboxylation of glutamic acid residues, hydroxylation and ADP-ribosylation, for instance, are described in most basic texts, such as Proteins—Structure and Molecular Properties, 2nd Ed., T. E. Creighton, W. H. Freeman and Company, New York (1993). Many detailed reviews are available on this subject, such as by Wold, F., Posttranslational Covalent Modification of Proteins, B. C. Johnson, Ed., Academic Press, New York 1-12 (1983); Seifter et al. (Meth. Enzymol. 182: 626-646 (1990)) and Rattan et al. (Ann. N. Y. Acad. Sci. 663:48-62 (1992)).

[0118] The present invention further provides fragments of the estrogen receptor proteins of the present invention, in addition to proteins and peptides that comprise and consist of such fragments. The fragments to which the invention pertains, however, are not to be construed as encompassing fragments that may be disclosed publicly prior to the present invention.

[0119] As used herein, a fragment comprises at least 8 or more contiguous amino acid residues from a estrogen receptor protein. Such fragments can be chosen based on the ability to retain one or more of the biological activities of the estrogen receptor protein or could be chosen for the ability to perform a function, e.g. act as an immunogen. Particularly important fragments are biologically active fragments, peptides which are, for example, about 8 or more amino acids in length, that contain a variant amino acid residue (FIG. 2). Such fragments will typically comprise a domain or motif of the estrogen receptor proteins of the present invention, e.g., active site, ligand binding domain or DNA binding domain. Further, possible fragments include, but are not limited to, domain or motif containing fragments, soluble peptide fragments, and fragments containing immunogenic structures. Predicted domains and functional sites are readily identifiable by computer programs well-known and readily available to those of skill in the art (e.g., PROSITE analysis).

[0120] Protein/Peptide Uses

[0121] The proteins of the present invention can be used in assays to determine the biological activity of the protein, including in a panel of multiple proteins for high-throughput screening; to raise antibodies or to elicit another immune response; as a reagent (including the labeled reagent) in assays designed to quantitatively determine levels of the protein (or its binding partner or receptor) in biological fluids; and as markers for tissues in which the corresponding protein is preferentially expressed (either constitutively or at a particular stage of tissue differentiation or development or in a disease state). Any or all of these research utilities are capable of being developed into reagent grade or kit format for commercialization as research products. Methods for performing the uses listed above are well known to those skilled in the art. References disclosing such methods include “Molecular Cloning: A Laboratory Manual”, 2d ed., Cold Spring Harbor Laboratory Press, Sambrook, J., E. F. Fritsch and T. Maniatis eds., 1989, and “Methods in Enzymology: Guide to Molecular Cloning Techniques”, Academic Press, Berger, S. L. and A. R. Kimmel eds., 1987.

[0122] The estrogen receptor proteins of the present invention are useful for biological assay. Such assays involve any of the known estrogen receptor functions or activities or properties useful for the diagnosis and treatment of estrogen receptor-related conditions.

[0123] The estrogen receptor proteins of the present invention are also useful in drug screening assays, in cell-based or cell-free systems. Cell-based systems can be native, i.e., cells that normally express the receptor protein, as a biopsy or expanded in cell culture. In one embodiment, however, cell-based assays involve recombinant host cells expressing the receptor protein.

[0124] The estrogen receptor proteins of the present invention can be used to identify compounds that modulate receptor activity. Both the estrogen receptor protein of the present invention and appropriate fragments can be used in high-throughput screens to assay candidate compounds for the ability to bind and/or modulate the activity of the receptor. These compounds can be further screened against a functional receptor to determine the effect of the compound on the receptor activity. Further, these compounds can be tested in animal or invertebrate systems to determine activity/effectiveness. Compounds can be identified that activate (agonist) or inactivate (antagonist) the receptor to a desired degree. Such compounds can be selected for the ability to act on one or more of the variant estrogen receptor proteins of the present invention.

[0125] Further, the receptor polypeptides can be used to screen a compound for the ability to stimulate or inhibit interaction between the receptor protein and a target molecule that normally interacts with the receptor protein, e.g. estrogen. The target can be ligand or a binding partner that the receptor protein normally interacts (for example, an estrogen ligand or a DNA sequence). Such assays typically include the steps of combining the receptor protein with a candidate compound under conditions that allow the receptor protein, or fragment, to interact with the target molecule, and to detect the formation of a complex between the protein and the target or to detect the biochemical consequence of the interaction with the receptor protein and the target, such as any of the associated effects of DNA binding or signal transduction.

[0126] Candidate compounds include, for example, 1) peptides such as soluble peptides, including Ig-tailed fusion peptides and members of random peptide libraries (see, e.g., Lam et al., Nature 354:82-84 (1991); Houghten et al., Nature 354:84-86 (1991)) and combinatorial chemistry-derived molecular libraries made of D- and/or L- configuration amino acids; 2) phosphopeptides (e.g., members of random and partially degenerate, directed phosphopeptide libraries, see, e.g., Songyang et al., Cell 72:767-778 (1993)); 3) antibodies (e.g., polyclonal, monoclonal, humanized, anti-idiotypic, chimeric, and single chain antibodies as well as Fab, F(ab′)₂, Fab expression library fragments, and epitope-binding fragments of antibodies); and 4) small organic and inorganic molecules (e.g., molecules obtained from combinatorial and natural product libraries).

[0127] One candidate compound is a soluble fragment of the receptor that competes for ligand binding. Other candidate compounds include mutant receptors or appropriate fragments containing mutations that affect receptor function and thus compete for ligand. Accordingly, a fragment that competes for ligand, for example with a higher affinity, or a fragment that binds ligand but does not allow release, is encompassed by the invention.

[0128] The invention further includes other end point assays to identify compounds that modulate (stimulate or inhibit) receptor activity. The assays typically involve an assay of events in the signal transduction pathway that indicate receptor activity. Thus, the expression of genes that are up- or down-regulated in response to the receptor protein dependent signal cascade can be assayed. In one embodiment, the regulatory region of such genes can be operably linked to a marker that is easily detectable, such as luciferase. Alternatively, phosphorylation of the receptor protein, or a receptor protein target, could also be measured. Any of the biological or biochemical functions mediated by the receptor can be used as an endpoint assay. These include all of the biochemical or biochemical/biological events described herein, in the references cited herein, incorporated by reference for these endpoint assay targets, and other functions known to those of ordinary skill in the art.

[0129] The receptor polypeptides are also useful in competition binding assays in methods designed to discover compounds that interact with the receptor. Thus, a compound is exposed to a receptor polypeptide under conditions that allow the compound to bind or to otherwise interact with the polypeptide. Ligands to the receptor is also added to the mixture. If the test compound interacts with the receptor or ligand, it decreases the amount of complex formed or activity from the receptor target. This type of assay is particularly useful in cases in which compounds are sought that interact with specific regions of the receptor.

[0130] To perform cell free drug screening assays, it is sometimes desirable to immobilize either the receptor protein, or fragment, or its target molecule to facilitate separation of complexes from uncomplexed forms of one or both of the proteins, as well as to accommodate automation of the assay.

[0131] Techniques for immobilizing proteins on matrices can be used in the drug screening assays. In one embodiment, a fusion protein can be provided which adds a domain that allows the protein to be bound to a matrix. For example, glutathione-S-transferase/15625 fusion proteins can be adsorbed onto glutathione sepharose beads (Sigma Chemical, St. Louis, Mo.) or glutathione derivatized microtitre plates, which are then combined with the cell lysates (e.g., ³⁵S-labeled) and the candidate compound, and the mixture incubated under conditions conducive to complex formation (e.g., at physiological conditions for salt and pH). Following incubation, the beads are washed to remove any unbound label, and the matrix immobilized and radiolabel determined directly, or in the supernatant after the complexes are dissociated. Alternatively, the complexes can be dissociated from the matrix, separated by SDS-PAGE, and the level of receptor-binding protein found in the bead fraction quantitated from the gel using standard electrophoretic techniques. For example, either the polypeptide or its target molecule can be immobilized utilizing conjugation of biotin and streptavidin using techniques well known in the art. Alternatively, antibodies reactive with the protein but which do not interfere with binding of the protein to its target molecule can be derivatized to the wells of the plate, and the protein trapped in the wells by antibody conjugation. Preparations of a receptor-binding protein and a candidate compound are incubated in the receptor protein-presenting wells and the amount of complex trapped in the well can be quantitated. Methods for detecting such complexes, in addition to those described above for the GST-immobilized complexes, include immunodetection of complexes using antibodies reactive with the receptor protein target molecule, or which are reactive with receptor protein and compete with the target molecule, as well as enzyme-linked assays which rely on detecting an enzymatic activity associated with the target molecule.

[0132] Agents that modulate the protein of the present invention can be identified using one or more of the above assays, alone or in combination. It is generally preferable to use a cell-based or cell free system first and then confirm activity in an animal or other model system. Such model systems are well known in the art and can readily be employed in this context.

[0133] Modulators of receptor protein activity identified according to these drug-screening assays can be used to treat a subject with a disorder mediated by the receptor pathway, by treating cells that express the estrogen receptor protein. These methods of treatment include the steps of administering the modulators of protein activity in a pharmaceutical composition as described herein, to a subject in need of such treatment.

[0134] This invention further pertains to novel agents identified by the above-described screening assays. Accordingly, it is within the scope of this invention to further use an agent identified as described herein in an appropriate animal model. For example, an agent identified as described herein (e.g., an estrogen receptor modulating agent, an antisense estrogen receptor nucleic acid molecule, an estrogen receptor-specific antibody, or an estrogen receptor-binding partner) can be used in an animal model to determine the efficacy, toxicity, or side effects of treatment with such an agent. Alternatively, an agent identified as described herein can be used in an animal model to determine the mechanism of action of such an agent. Furthermore, this invention pertains to uses of novel agents identified by the above-described screening assays for treatments as described herein.

[0135] The estrogen receptor proteins of the present invention are also useful to provide a target for diagnosing a disease or predisposition to disease mediated by the estrogen receptor. Accordingly, the invention provides methods for detecting the presence, or levels of, the estrogen receptor variants of the present invention (or encoding mRNA) in a cell, tissue, or organism. The method involves contacting a biological sample with a compound capable of interacting with the receptor protein (or gene or mRNA encoding the receptor) such that the interaction can be detected.

[0136] One agent for detecting a protein in a sample is an antibody capable of selectively binding to a variant form of the estrogen receptor protein. Such samples include tissues, cells and biological fluids isolated from a subject, as well as tissues, cells and fluids present within a subject.

[0137] The estrogen receptor proteins of the present invention also provide targets for diagnosing active disease, or predisposition to disease, in a patient having a variant estrogen receptor, particularly a disease involving the estrogen pathway, such as bone growth, cell differentiation, etc. Thus, the receptor can be isolated from a biological sample and assayed for the presence of a genetic mutation that results in aberrant receptor activity. This includes amino acid substitution, deletion, insertion, rearrangement, (as the result of aberrant splicing events), and inappropriate post-translational modification as provided in FIG. 2. Analytic methods include altered electrophoretic mobility, altered tryptic peptide digest, altered receptor activity in cell-based or cell-free assay, alteration in ligand or antibody-binding pattern, altered isoelectric point, direct amino acid sequencing, and any other of the known assay techniques useful for detecting mutations in a protein. Particularly useful are the variation provided in FIG. 2.

[0138] In vitro techniques for detection of peptide include enzyme linked immunosorbent assays (ELISAs), Western blots, immunoprecipitations and immunofluorescence. Alternatively, the peptide can be detected in vivo in a subject by introducing into the subject a labeled anti-peptide antibody. For example, the antibody can be labeled with a radioactive marker whose presence and location in a subject can be detected by standard imaging techniques. Particularly useful are methods that detect the specific allelic variants of the estrogen receptor disclosed herein that are expressed in a subject and methods that detect fragments of a peptide in a sample.

[0139] The peptides are also useful in pharmacogenomic analysis. Pharmacogenomics deal with clinically significant hereditary variations in the response to drugs due to altered drug disposition and abnormal action in affected persons. See, e.g., Eichelbaum, M. (Clin. Exp. Pharmacol. Physiol. 23(10-11) :983-985 (1996)), and Linder, M. W. (Clin. Chem. 43(2):254-266 (1997)). The clinical outcomes of these variations result in severe toxicity of therapeutic drugs in certain individuals or therapeutic failure of drugs in certain individuals as a result of individual variation in metabolism. Thus, the genotype of the individual can determine the way a therapeutic compound acts on the body or the way the body metabolizes the compound. Further, the activity of drug metabolizing enzymes effects both the intensity and duration of drug action. Thus, the pharmacogenomics of the individual permit the selection of effective compounds and effective dosages of such compounds for prophylactic or therapeutic treatment based on the individual's genotype. The discovery of genetic polymorphisms in some drug metabolizing enzymes has explained why some patients do not obtain the expected drug effects, show an exaggerated drug effect, or experience serious toxicity from standard drug dosages. Polymorphisms can be expressed in the phenotype of the extensive metabolizer and the phenotype of the poor metabolizer. Accordingly, genetic polymorphism may lead to allelic protein variants of the receptor protein in which one or more of the receptor functions in one population is different from those in another population. The peptides thus allow a target to ascertain a genetic predisposition that can affect treatment modality. Thus, in a ligand-based treatment, polymorphism may give rise to amino terminal extracellular domains and/or other ligand-binding regions that are more or less active in ligand binding, and receptor activation. Accordingly, ligand dosage would necessarily be modified to maximize the therapeutic effect within a given population containing a polymorphism/haplotype. As an alternative to genotyping, specific polymorphic peptides could be identified.

[0140] Antibodies

[0141] The invention also provides antibodies that selectively bind to the estrogen receptor proteins of the present invention as well as fragments thereof. As used herein, an antibody selectively binds a target protein when it binds the target protein and does not significantly bind to unrelated proteins. An antibody is still considered to selectively bind a protein even if it also binds to other proteins that are not substantially homologous with the target protein so long as such proteins share homology with a fragment or domain of the protein target of the antibody. In this case, it would be understood that antibody binding to the protein is still selective despite some degree of cross-reactivity.

[0142] As used herein, an antibody is defined in terms consistent with that recognized within the art: they are multi-subunit proteins produced by a mammalian organism in response to an antigen challenge. The antibodies of the present invention include polyclonal antibodies and monoclonal antibodies, as well as fragments of such antibodies, including, but not limited to, Fab or F(ab′)₂, and Fv fragments.

[0143] Many methods are known for generating and/or identifying antibodies to a given target peptide. Several such methods are described by Harlow, Antibodies, Cold Spring Harbor Press, (1989). In general, to generate antibodies, an isolated peptide is used as an immunogen and is administered to a mammalian organism, such as a rat, rabbit or mouse. The full-length protein, an antigenic peptide fragment or a fusion protein can be used.

[0144] Antibodies are preferably prepared from regions or discrete fragments of the estrogen receptor protein. Antibodies can be prepared from any region of the peptide as described herein. However, preferred regions will include those involved in function/activity and/or receptor/binding partner interaction. An antigenic fragment will typically comprise at least 10 contiguous amino acid residues. The antigenic peptide can comprise, however, at least 12, 14, 20 or more amino acid residues. Such fragments can be selected on a physical property, such as fragments correspond to regions that are located on the surface of the protein, e.g., hydrophilic regions or can be selected based on sequence uniqueness.

[0145] Detection on an antibody of the present invention can be facilitated by coupling (i.e., physically linking) the antibody to a detectable substance. Examples of detectable substances include various enzymes, prosthetic groups, fluorescent materials, luminescent materials, bioluminescent materials, and radioactive materials. Examples of suitable enzymes include horseradish peroxidase, alkaline phosphatase, β-galactosidase, or acetylcholinesterase; examples of suitable prosthetic group complexes include streptavidin/biotin and avidin/biotin; examples of suitable fluorescent materials include umbelliferone, fluorescein, fluorescein isothiocyanate, rhodamine, dichlorotriazinylamine fluorescein, dansyl chloride or phycoerythrin; an example of a luminescent material includes luminol; examples of bioluminescent materials include luciferase, luciferin, and aequorin, and examples of suitable radioactive material include ¹²⁵I, ¹³¹I, ³⁵S or ³H.

[0146] Antibody Uses

[0147] The antibodies can be used to isolate the estrogen receptor protein of the present invention by standard techniques, such as affinity chromatography or immunoprecipitation. The antibodies can facilitate the purification of the natural protein from cells and recombinantly produced protein expressed in host cells. In addition, such antibodies are useful to detect the presence of the estrogen receptor protein of the present invention in cells or tissues to determine the pattern of expression of the protein among various tissues in an organism and over the course of normal development. Further, such antibodies can be used to detect protein in situ, in vitro, or in a cell lysate or supernatant in order to evaluate the abundance and pattern of expression. Also, such antibodies can be used to assess abnormal tissue distribution or abnormal expression during development. Antibody detection of circulating fragments of the full length estrogen receptor protein can be used to identify turnover.

[0148] Further, the antibodies can be used to assess expression in disease states such as in active stages of the disease or in an individual with a predisposition toward disease related to the protein's function, particularly diseases involving bone growth/formation/degeneration. When a disorder is caused by an inappropriate tissue distribution, developmental expression, level of expression of the protein, or expressed/processed form, the antibody can be prepared against the normal protein. If a disorder is characterized by a specific mutation in the protein, antibodies specific for this mutant protein can be used to assay for the presence of the specific mutant protein.

[0149] The antibodies can also be used to assess normal and aberrant subcellular localization of cells in the various tissues in an organism. The diagnostic uses can be applied, not only in genetic testing, but also in monitoring a treatment modality. Accordingly, where treatment is ultimately aimed at correcting the expression level or the presence of aberrant sequence and aberrant tissue distribution or developmental expression, antibodies directed against the protein or relevant fragments can be used to monitor therapeutic efficacy.

[0150] Additionally, antibodies are useful in pharmacogenomic analysis. Thus, antibodies prepared against polymorphic proteins can be used to identify individuals that require modified treatment modalities. The antibodies are also useful as diagnostic tools as an immunological marker for aberrant estrogen receptor protein analyzed by electrophoretic mobility, isoelectric point, tryptic peptide digest, and other physical assays known to those in the art.

[0151] The antibodies are also useful for inhibiting protein function, for example, blocking the binding of the estrogen receptor protein to a binding partner such as a ligand. These uses can also be applied in a therapeutic context in which treatment involves inhibiting the protein's function. An antibody can be used, for example, to block binding, thus modulating (agonizing or antagonizing) the peptides activity. Antibodies can be prepared against specific fragments containing sites required for function or against intact protein that is associated with a cell or cell membrane.

[0152] The invention also encompasses kits for using antibodies to detect the presence of a protein in a biological sample. The kit can comprise antibodies such as a labeled or labelable antibody and a compound or agent for detecting estrogen receptor protein in a biological sample; means for determining the amount of protein in the sample; means for comparing the amount of estrogen receptor protein in the sample with a standard; and instructions for use.

[0153] Nucleic Acid Molecules

[0154] The present invention further provides isolated nucleic acid molecules that encode any of the estrogen receptor proteins of the present invention. Such nucleic acid molecules will consist of, consist essentially of, or comprise a nucleotide sequence that encodes one of the estrogen receptor proteins of the present invention.

[0155] As used herein, an “isolated” nucleic acid molecule is one that is separated from other nucleic acid present in the natural source of the nucleic acid. Preferably, an “isolated” nucleic acid is free of sequences which naturally flank the nucleic acid (i.e., sequences located at the 5′ and 3′ ends of the nucleic acid) in the genomic DNA of the organism from which the nucleic acid is derived. However, there can be some flanking nucleotide sequences, for example up to about 5 KB, 4 KB, 3 KB, 2 KB, or 1 KB or less, particularly contiguous peptide encoding sequences and peptide encoding sequences within the same gene but separated by introns in the genomic sequence. The important point is that the nucleic acid is isolated from remote and unimportant flanking sequences such that it can be subjected to the specific manipulations described herein such as recombinant expression, preparation of probes and primers, and other uses specific to the nucleic acid sequences.

[0156] Moreover, an “isolated” nucleic acid molecule, such as a cDNA molecule, can be substantially free of other cellular material, or culture medium when produced by recombinant techniques, or chemical precursors or other chemicals when chemically synthesized. However, the nucleic acid molecule can be fused to other coding or regulatory sequences and still be considered isolated.

[0157] For example, recombinant DNA molecules contained in a vector are considered isolated. Further examples of isolated DNA molecules include recombinant DNA molecules maintained in heterologous host cells or purified (partially or substantially) DNA molecules in solution. Isolated RNA molecules include in vivo or in vitro RNA transcripts of the isolated DNA molecules of the present invention. Isolated nucleic acid molecules according to the present invention further include such molecules produced synthetically.

[0158] Accordingly, the present invention provides nucleic acid molecules that consist of the nucleotide sequences shown in FIG. 1, including one or more of the sequence polymorphisms provided in FIG. 2. A nucleic acid molecule consists of a nucleotide sequence when the nucleotide sequence is the complete nucleotide sequence of the nucleic acid molecule.

[0159] The present invention further provides nucleic acid molecules that consist essentially of the nucleotide sequence shown in FIG. 1, including one or more of the sequence polymorphisms provided in FIG. 2. A nucleic acid molecule consists essentially of a nucleotide sequence when such a nucleotide sequence is present with only a few additional nucleic acid residues in the final nucleic acid molecule.

[0160] The present invention further provides nucleic acid molecules that are comprised of the nucleotide sequences shown in FIG. 1, including one or more of the sequence polymorphisms provided in FIG. 2. A nucleic acid molecule is comprised of a nucleotide sequence when the nucleotide sequence is at least part of the final nucleotide sequence of the nucleic acid molecule. In such a fashion, the nucleic acid molecule can be only the nucleotide sequence or have additional nucleic acid residues, such as nucleic acid residues that are naturally associated with it or heterologous nucleotide sequences. Such a nucleic acid molecule can have a few additional nucleotides or can comprise several hundred or more additional nucleotides. A brief description of how various types of these nucleic acid molecules can be readily made/isolated is provided below.

[0161] The isolated nucleic acid molecules can encode the mature protein plus additional amino or carboxyl-terminal amino acids, or amino acids interior to the mature peptide (when the mature form has more than one peptide chain, for instance). Such sequences may play a role in processing of a protein from precursor to a mature form, facilitate protein trafficking, prolong or shorten protein half-life or facilitate manipulation of a protein for assay or production, among other things. As generally is the case in situ, the additional amino acids may be processed away from the mature protein by cellular enzymes.

[0162] As mentioned above, the isolated nucleic acid molecules include, but are not limited to, the sequence encoding the estrogen receptor protein alone, the sequence encoding the mature peptide and additional coding sequences, such as a leader or secretory sequence (e.g., a pre-pro or pro-protein sequence), the sequence encoding the mature peptide, with or without the additional coding sequences, plus additional non-coding sequences, for example introns and non-coding 5′ and 3′ sequences such as transcribed but non-translated sequences that play a role in transcription, mRNA processing (including splicing and polyadenylation signals), ribosome binding and stability of mRNA, as well as genomic regulatory sequences such as promoters. In addition, the nucleic acid molecule may be fused to a marker sequence encoding, for example, a peptide that facilitates purification.

[0163] Isolated nucleic acid molecules can be in the form of RNA, such as mRNA, or in the form DNA, including cDNA and genomic DNA obtained by cloning or produced by chemical synthetic techniques or by a combination thereof. The nucleic acid, especially DNA, can be double-stranded or single-stranded. Single-stranded nucleic acid can be the coding strand (sense strand) or the non-coding strand (anti-sense strand).

[0164] The invention further provides nucleic acid molecules that encode fragments of the proteins of the present invention. A fragment comprises a contiguous nucleotide sequence greater than 12 or more nucleotides. Further, a fragment could at least 30, 40, 50, 100, 250 or 500 nucleotides in length. The length of the fragment will be based on its intended use. For example, the fragment can encode epitope-bearing regions of the peptide, or can be useful as DNA probes and primers. Such fragments can be isolated using the known nucleotide sequence to synthesize an oligonucleotide probe. A labeled probe can then be used to screen a cDNA library, genomic DNA library, or mRNA to isolate nucleic acid corresponding to the coding region. Further, primers can be used in PCR reactions to clone specific regions of gene.

[0165] A probe/primer typically comprises substantially a purified oligonucleotide or oligonucleotide pair. The oligonucleotide typically comprises a region of nucleotide sequence that hybridizes under stringent conditions to at least about 12, 20, 25, 40, 50 or more consecutive nucleotides.

[0166] As used herein, the term “hybridizes under stringent conditions” is intended to describe conditions for hybridization and washing under which nucleotide sequences encoding a peptide at least 50-55% homologous to each other typically remain hybridized to each other. The conditions can be such that sequences at least about 65%, at least about 70%, or at least about 75% or more homologous to each other typically remain hybridized to each other. Such stringent conditions are known to those skilled in the art and can be found in Current Protocols in Molecular Biology, John Wiley & Sons, N.Y. (1989), 6.3.1-6.3.6. One example of stringent hybridization conditions are hybridization in 6×sodium chloride/sodium citrate (SSC) at about 45° C., followed by one or more washes in 0.2×SSC, 0.1% SDS at 50-65° C.

[0167] Nucleic Acid Molecule Uses

[0168] The nucleic acid molecules of the present invention are useful for probes, primers, chemical intermediates, and in biological assays. The probe can correspond to any sequence along the entire length of the nucleic acid molecules provided in FIG. 1, including one or more of the sequence polymorphisms provided in FIG. 2. Accordingly, it could be derived from 5′ noncoding regions, the coding region, and 3′ noncoding regions. However, as discussed, fragments are not to be construed as encompassing fragments disclosed prior to the present invention.

[0169] The nucleic acid molecules are also useful as primers for PCR to amplify any given region of a nucleic acid molecule and are useful to synthesize antisense molecules of desired length and sequence.

[0170] The nucleic acid molecules are also useful for constructing recombinant vectors. Such vectors include expression vectors that express a portion of, or all of, the peptide sequences. Vectors also include insertion vectors, used to integrate into another nucleic acid molecule sequence, such as into the cellular genome, to alter in situ expression of a gene and/or gene product. For example, an endogenous coding sequence can be replaced via homologous recombination with all or part of the coding region containing one or more specifically introduced mutations.

[0171] The nucleic acid molecules are also useful for expressing antigenic portions of the proteins.

[0172] The nucleic acid molecules are also useful for designing ribozymes corresponding to all, or a part, of the mRNA produced from the nucleic acid molecules described herein.

[0173] The nucleic acid molecules are also useful for constructing host cells expressing a part, or all, of the nucleic acid molecules and peptides.

[0174] The nucleic acid molecules are also useful for constructing transgenic animals expressing all, or a part, of the nucleic acid molecules and peptides.

[0175] The nucleic acid molecules are also useful for making vectors that express part, or all, of the peptides.

[0176] The nucleic acid molecules are also useful as hybridization probes for determining the presence, level, form and distribution of nucleic acid expression. Accordingly, the probes can be used to detect the presence of, or to determine levels of, a specific nucleic acid molecule in cells, tissues, and in organisms. The nucleic acid whose level is determined can be DNA or RNA. Accordingly, probes corresponding to the peptides described herein can be used to assess expression and/or gene copy number in a given cell, tissue, or organism. These uses are relevant for diagnosis of disorders involving an increase or decrease in estrogen receptor protein expression relative to normal results.

[0177] In vitro techniques for detection of mRNA include Northern hybridizations and in situ hybridizations. In vitro techniques for detecting DNA include Southern hybridizations and in situ hybridization.

[0178] Probes can be used as a part of a diagnostic test kit for identifying cells or tissues that express a estrogen receptor proteins of the present invention, such as by measuring a level of a receptor-encoding nucleic acid in a sample of cells from a subject e.g., mRNA or genomic DNA, or determining if a receptor gene has been mutated.

[0179] Nucleic acid expression assays are useful for drug screening to identify compounds that modulate estrogen receptor nucleic acid expression.

[0180] The invention thus provides a method for identifying a compound that can be used to treat a disorder associated with nucleic acid expression of the estrogen receptor gene. The method typically includes assaying the ability of the compound to modulate the expression of the estrogen receptor nucleic acid and thus identifying a compound that can be used to treat a disorder characterized by undesired estrogen receptor nucleic acid expression. The assays can be performed in cell-based and cell-free systems. Cell-based assays include cells naturally expressing the estrogen receptor nucleic acid or recombinant cells genetically engineered to express specific nucleic acid sequences.

[0181] The assay for estrogen receptor nucleic acid expression can involve direct assay of nucleic acid levels, such as mRNA levels, or on collateral compounds involved in the signal pathway. Further, the expression of genes that are up- or down-regulated in response to the estrogen receptor protein signal pathway can also be assayed. In this embodiment the regulatory regions of these genes can be operably linked to a reporter gene such as luciferase.

[0182] Thus, modulators of estrogen receptor gene expression can be identified in a method wherein a cell is contacted with a candidate compound and the expression of mRNA determined. The level of expression of estrogen receptor mRNA in the presence of the candidate compound is compared to the level of expression of estrogen receptor mRNA in the absence of the candidate compound. The candidate compound can then be identified as a modulator of nucleic acid expression based on this comparison and be used, for example to treat a disorder characterized by aberrant nucleic acid expression. When expression of mRNA is statistically significantly greater in the presence of the candidate compound than in its absence, the candidate compound is identified as a stimulator of nucleic acid expression. When nucleic acid expression is statistically significantly less in the presence of the candidate compound than in its absence, the candidate compound is identified as an inhibitor of nucleic acid expression.

[0183] The invention further provides methods of treatment, with the nucleic acid as a target, using a compound identified through drug screening as a gene modulator to modulate estrogen receptor nucleic acid expression. Modulation includes both up-regulation (i.e. activation or agonization) or down-regulation (suppression or antagonization) or nucleic acid expression.

[0184] Alternatively, a modulator for estrogen receptor nucleic acid expression can be a small molecule or drug identified using the screening assays described herein as long as the drug or small molecule inhibits the estrogen receptor nucleic acid expression.

[0185] The nucleic acid molecules are also useful for monitoring the effectiveness of modulating compounds on the expression or activity of the estrogen receptor gene in clinical trials or in a treatment regimen. Thus, the gene expression pattern can serve as a barometer for the continuing effectiveness of treatment with the compound, particularly with compounds to which a patient can develop resistance. The gene expression pattern can also serve as a marker indicative of a physiological response of the affected cells to the compound. Accordingly, such monitoring would allow either increased administration of the compound or the administration of alternative compounds to which the patient has not become resistant. Similarly, if the level of nucleic acid expression falls below a desirable level, administration of the compound could be commensurately decreased.

[0186] The nucleic acid molecules are also useful in diagnostic assays for qualitative changes in estrogen receptor nucleic acid, and particularly in qualitative changes that lead to pathology. The nucleic acid molecules can be used to detect mutations in estrogen receptor genes and gene expression products such as mRNA. The nucleic acid molecules can be used as hybridization probes to detect naturally-occurring genetic mutations in the estrogen receptor gene and thereby to determine whether a subject with the mutation is at risk for a disorder caused by the mutation. Mutations include deletion, addition, or substitution of one or more nucleotides in the gene, chromosomal rearrangement, such as inversion or transposition, modification of genomic DNA, such as aberrant methylation patterns or changes in gene copy number, such as amplification. Detection of a mutated form of the estrogen receptor gene associated with a dysfunction provides a diagnostic tool for an active disease or susceptibility to disease when the disease results from overexpression, underexpression, or altered expression of a estrogen receptor protein.

[0187] Individuals carrying mutations in the estrogen receptor gene can be detected at the nucleic acid level by a variety of techniques. Genomic DNA can be analyzed directly or can be amplified by using PCR prior to analysis. RNA or cDNA can be used in the same way. In some uses, detection of the mutation involves the use of a probe/primer in a polymerase chain reaction (PCR) (see, e.g. U.S. Pat. Nos. 4,683,195 and 4,683,202), such as anchor PCR or RACE PCR, or, alternatively, in a ligation chain reaction (LCR) (see, e.g., Landegran et al., Science 241:1077-1080 (1988); and Nakazawa et al., PNAS 91:360-364 (1994)), the latter of which can be particularly useful for detecting point mutations in the gene (see Abravaya et al., Nucleic Acids Res. 23:675-682 (1995)). This method can include the steps of collecting a sample of cells from a patient, isolating nucleic acid (e.g., genomic, mRNA or both) from the cells of the sample, contacting the nucleic acid sample with one or more primers which specifically hybridize to a gene under conditions such that hybridization and amplification of the gene (if present) occurs, and detecting the presence or absence of an amplification product, or detecting the size of the amplification product and comparing the length to a control sample. Deletions and insertions can be detected by a change in size of the amplified product compared to the normal genotype. Point mutations can be identified by hybridizing amplified DNA to normal RNA or antisense DNA sequences.

[0188] Alternatively, mutations in a estrogen receptor gene can be directly identified, for example, by alterations in restriction enzyme digestion patterns determined by gel electrophoresis.

[0189] Further, sequence-specific ribozymes (U.S. Pat. No. 5,498,531) can be used to score for the presence of specific mutations by development or loss of a ribozyme cleavage site. Perfectly matched sequences can be distinguished from mismatched sequences by nuclease cleavage digestion assays or by differences in melting temperature.

[0190] Sequence changes at specific locations can also be assessed by nuclease protection assays such as RNase and S1 protection or the chemical cleavage method. Furthermore, sequence differences between a mutant estrogen receptor gene and a wild-type gene can be determined by direct DNA sequencing. A variety of automated sequencing procedures can be utilized when performing the diagnostic assays ((1995) Biotechniques 19:448), including sequencing by mass spectrometry (see, e.g., PCT International Publication No. WO 94/16101; Cohen et al., Adv. Chromatogr. 36:127-162 (1996); and Griffin et al., Appl. Biochem. Biotechnol. 38:147-159 (1993)).

[0191] Other methods for detecting mutations in the gene include methods in which protection from cleavage agents is used to detect mismatched bases in RNA/RNA or RNA/DNA duplexes (Myers et al., Science 230:1242 (1985)); Cotton et al., PNAS85:4397 (1988); Saleeba et al., Meth. Enzymol. 217:286-295 (1992)), electrophoretic mobility of mutant and wild type nucleic acid is compared (Orita et al., PNAS 86:2766 (1989); Cotton et al., Mutat. Res. 285:125-144 (1993); and Hayashi et al., Genet. Anal. Tech. Appl. 9:73-79 (1992)), and movement of mutant or wild-type fragments in polyacrylamide gels containing a gradient of denaturant is assayed using denaturing gradient gel electrophoresis (Myers et al., Nature 313:495 (1985)). Examples of other techniques for detecting point mutations include, selective oligonucleotide hybridization, selective amplification, and selective primer extension.

[0192] The nucleic acid molecules are also useful for testing an individual for a genotype that while not necessarily causing diseases; nevertheless affects the treatment modality. Thus, the nucleic acid molecules can be used to study the relationship between an individual's genotype and the individual's response to a compound used for treatment (pharmacogenomic relationship). Accordingly, the nucleic acid molecules described herein can be used to assess the mutation content of the estrogen receptor gene in an individual in order to select an appropriate compound or dosage regimen for treatment.

[0193] Thus nucleic acid molecules displaying genetic variations that affect treatment provide a diagnostic target that can be used to tailor treatment in an individual. Accordingly, the production of recombinant cells and animals containing these polymorphism/haplotypes allow effective clinical design of treatment compounds and dosage regimens.

[0194] The nucleic acid molecules are thus useful as antisense constructs to control estrogen receptor gene expression in cells, tissues, and organisms. A DNA antisense nucleic acid molecule is designed to be complementary to a region of the gene involved in transcription, preventing transcription and hence production of estrogen receptor protein. An antisense RNA or DNA nucleic acid molecule would hybridize to the mRNA and thus block translation of mRNA into estrogen receptor protein.

[0195] Alternatively, a class of antisense molecules can be used to inactivate mRNA in order to decrease expression of estrogen receptor nucleic acid. Accordingly, these molecules can treat a disorder characterized by abnormal or undesired estrogen receptor nucleic acid expression. This technique involves cleavage by means of ribozymes containing nucleotide sequences complementary to one or more regions in the mRNA that attenuate the ability of the mRNA to be translated. Possible regions include coding regions and particularly coding regions corresponding to the catalytic and other functional activities of the estrogen receptor proteins of the present invention, such as ligand binding.

[0196] The nucleic acid molecules also provide vectors for gene therapy in patients containing cells that are aberrant in estrogen receptor gene expression. Thus, recombinant cells, which include the patient's cells that have been engineered ex vivo and returned to the patient, are introduced into an individual where the cells produce the desired estrogen receptor protein to treat the individual.

[0197] The invention also encompasses kits for detecting the presence of a estrogen receptor nucleic acid in a biological sample. For example, the kit can comprise reagents such as a labeled or labelable nucleic acid or agent capable of detecting estrogen receptor nucleic acid in a biological sample; means for determining the amount of estrogen receptor nucleic acid in the sample; and means for comparing the amount of estrogen receptor nucleic acid in the sample with a standard. The compound or agent can be packaged in a suitable container. The kit can further comprise instructions for using the kit to detect estrogen receptor protein mRNA or DNA.

[0198] Design of SNP-Containing Nucleic Acids Detection Methods

[0199] The SNP-containing nucleic acid molecules of the present invention are useful as probes, primers, chemical intermediates, and in biological assays for SNPs of the present invention. The probes/primers can correspond to one or more of the SNPs provided in FIG. 2 or can correspond to a specific region 5′ and/or 3′ to a SNP position. However, as discussed above, fragments are not to be construed as encompassing fragments that are not associated with SNPs of the present invention or those known in the art for SNP detection. The SNP-containing nucleic acid molecules and information provided herein are also useful for designing primers for PCR to amplify any given SNP of the present invention and to design any formatted SNP detection reagent/kits.

[0200] A probe/primer typically comprises substantially a purified oligonucleotide or oligonucleotide pair. The oligonucleotide typically comprises a region of nucleotide sequence that hybridizes under stringent conditions to at least about 12, 20, 25, 40, 50 or more consecutive nucleotides. Depending on the particular application, the consecutive nucleotides can either include the target SNP position, or be a specific region in close enough proximity 5′ and/or 3′ to the SNP position to carry out the desired assay.

[0201] Preferred primer and probe sequences can readily be determined using the sequences provided in FIGS. 1, 2, and 9. It will be apparent to one of skill in the art that such primers and probes are useful as diagnostic probes or amplification primers for genotyping SNPs of the present invention, and can be incorporated into a kit format.

[0202] For analyzing SNPs, it may be appropriate to use oligonucleotides specific to alternative SNP alleles (referred to as “allele-specific oligonucleotides”, “allele-specific probes”, or “allele-specific primers”). The design and use of allele-specific probes for analyzing polymorphisms is described by e.g., Saiki et al., Nature 324, 163-166 (1986); Dattagupta, EP 235,726, Saiki, WO 89/11548.

[0203] In a hybridization-based assay, allele-specific probes can be designed that hybridize to a segment of target DNA from one individual but do not hybridize to the corresponding segment from another individual due to the presence of different polymorphic forms in the respective segments from the two individuals. Hybridization conditions should be sufficiently stringent that there is a significant difference in hybridization intensity between alleles, and preferably an essentially binary response, whereby a probe hybridizes to only one of the alleles. Some probes are designed to hybridize to a segment of target DNA such that the polymorphic site aligns with a central position (e.g., in a 15-mer at the 7 position; in a 16-mer, at either the 8 or 9 position) of the probe. This design of probe achieves good discrimination in hybridization between different allelic forms.

[0204] Allele-specific probes are often used in pairs, the “pairs” may be identical except for a one nucleotide mismatch that represents the allelic variants at the SNP position. One member of a pair perfectly matches a reference form of a target sequence and the other member perfectly matches a variant form. In the case of an array, several pairs of probes can then be immobilized on the same support for simultaneous analysis of multiple polymorphisms within the same target sequence.

[0205] In one type of PCR-based assay, an allele-specific primer hybridizes to a site on target DNA overlapping the SNP position and only primes amplification of an allelic form to which the primer exhibits perfect complementarity. See Gibbs, Nucleic Acid Res. 17 2427-2448 (1989). This primer is used in conjunction with a second primer that hybridizes at a distal site. Amplification proceeds from the two-primers, resulting in a detectable product that indicates the particular allelic form is present. A control is usually performed with a second pair of primers, one of which shows a single base mismatch at the polymorphic site and the other of which exhibits perfect complementarity to a distal site. The single-base mismatch prevents amplification and no detectable product is formed. The method works best when the mismatch is included in the 3′-most position of the oligonucleotide aligned with the polymorphism because this position is most destabilizing to elongation from the primer (see, e.g., WO 93/22456). This PCR-based assay can be utilized as part of the TaqMan assay, described below.

[0206] SNP Detection Kits, Nucleic Acid Arrays, and Integrated Systems

[0207] The present invention further provides SNP detection kits, such as arrays or microarrays of nucleic acid molecules, or probe/primer sets, that are based on the SNPs provided in FIGS. 1, 2, 4, 8, 9

[0208] In one embodiment of the present invention, kits are provided which contain the necessary reagents to carry out one or more assays that detect one or more SNPs disclosed herein. The present invention also provides multicomponent integrated systems for analyzing the SNPs provided by the present invention.

[0209] SNP detection kits may contain one or more oligonucleotide probes, or pairs of probes, that hybridize at or near each SNP position. Multiple pairs of allele-specific oligonucleotides may be included in the kit to simultaneously assay large numbers of SNPs, at least one of which is one of the SNPs of the present invention. In some kits, such as arrays, the allele-specific oligonucleotides are provided immobilized to a substrate. For example, the same substrate can comprise allele-specific oligonucleotide probes for detecting at least 1; 10; 100; 1000; 10,000; 100,000; 300,000 or substantially all of the polymorphisms shown in FIGS. 1, 2, 4, 8 and 9.

[0210] Specifically, the invention provides a compartmentalized kit to receive, in close confinement, one or more containers which comprises: (a) a first container comprising one of the nucleic acid probes, for example an allele-specific oligonucleotide, that can bind to a fragment of the human genome containing a SNP disclosed herein; and (b) one or more other containers comprising one or more of the following: wash reagents or reagents capable of detecting the presence of a bound probe.

[0211] In detail, a compartmentalized kit includes any kit in which reagents are contained in separate containers. Such containers include small glass containers, plastic containers, strips of plastic, glass or paper, or arraying material such as silica. Such containers allow one to efficiently transfer reagents from one compartment to another compartment such that the samples and reagents are not cross-contaminated, and the agents or solutions of each container can be added in a quantitative fashion from one compartment to another. Such containers may include a container which will accept the test sample, a container which contains the SNP probe, containers which contain wash reagents (such as phosphate buffered saline, Tris-buffers, etc.), and containers which contain the reagents used to detect the bound probe. The kit can further comprise reagents for PCR or other enzymatic reactions, and instructions for using the kit. One skilled in the art will readily recognize that the previously unidentified SNPs of the present invention can be routinely identified using the sequence information disclosed herein and can be readily incorporated into one of the established kit formats which are well known in the art.

[0212] The present invention further provides arrays or microarrays of nucleic acid molecules that are based on the sequence information provided in FIG. 1, including one or more of the variations provided in FIG. 2.

[0213] As used herein “Arrays” or “Microarrays” refers to an array of distinct polynucleotides or oligonucleotides synthesized on a substrate, such as paper, nylon or other type of membrane, filter, chip, glass slide, or any other suitable solid support. In one embodiment, the microarray is prepared and used according to the methods described in U.S. Pat. No. 5,837,832, Chee et al., PCT application WO95/11995 (Chee et al.), Lockhart, D. J. et al. (1996; Nat. Biotech. 14: 1675-1680) and Schena, M. et al. (1996; Proc. Natl. Acad. Sci. 93: 10614-10619), all of which are incorporated herein in their entirety by reference. In other embodiments, such arrays are produced by the methods described by Brown et al., U.S. Pat. No. 5,807,522. Arrays or microarrays are commonly referred to as “DNA chips”.

[0214] Any number of oligonucleotide probes, such as allele-specific oligonucleotides, may be implemented in an array, wherein each probe or pair of probes corresponds to a different SNP position. The oligonucleotides are synthesized at designated areas on a substrate using a light-directed chemical process. The substrate may be paper, nylon or other type of membrane, filter, chip, glass slide or any other suitable solid support.

[0215] Hybridization assays based on oligonucleotide arrays rely on the differences in hybridization stability of short oligonucleotides probes to perfectly matched and mismatched target sequence variants. Efficient access to polymorphism information is obtained through a basic structure comprising high-density arrays of oligonucleotide probes attached to a solid support (e.g., a chip) at selected positions. Each DNA chip can contain thousands to millions of individual synthetic DNA probes arranged in a grid-like pattern and miniaturized to the size of a dime, each corresponding to a particular SNP position or allelic variant. Preferably, probes are attached to a solid support in an ordered, addressable array.

[0216] The array/chip technology has already been applied with success in numerous cases. For example, the screening of mutations has been undertaken in the BRCA1 gene, in S. cerevisiae mutant strains, and in the protease gene of HIV-I virus (Hacia et al., 1996; Shoemaker et al., 1996; Kozal et al., 1996). Chips of various formats for use in detecting SNPs can be produced on a customized basis.

[0217] An array-based tiling strategy useful for detecting SNPs is described in EP 785280. Briefly, arrays may generally be “tiled” for a large number of specific polymorphisms. “Tiling” refers to the synthesis of a defined set of oligonucleotide probes that are made up of a sequence complementary to the target sequence of interest, as well as preselected variations of that sequence, e.g., substitution of one or more given positions with one or more members of the basis set of monomers, i.e. nucleotides. Tiling strategies are further described in PCT application No. WO 95/11995. In a particular aspect, arrays are tiled for a number of specific SNPs. In particular, the array is tiled to include a number of detection blocks, each detection block being specific for a specific SNP or a set of SNPs. For example, a detection block may be tiled to include a number of probes that span the sequence segment that includes a specific SNP. To ensure probes that are complementary to each allele, the probes are synthesized in pairs differing at the SNP position. In addition to the probes differing at the SNP position, monosubstituted probes are also generally tiled within the detection block. Such methods can readily be applied to the SNP information disclosed herein.

[0218] These monosubstituted probes have bases at and up to a certain number of bases in either direction from the polymorphism, substituted with the remaining nucleotides (selected from A, T, G, C and U). Typically the probes in a tiled detection block will include substitutions of the sequence positions up to and including those that are 5 bases away from the SNP. The monosubstituted probes provide internal controls for the tiled array, to distinguish actual hybridization from artefactual cross-hybridization. Upon completion of hybridization with the target sequence and washing of the array, the array is scanned to determine the position on the array to which the target sequence hybridizes. The hybridization data from the scanned array is then analyzed to identify which allele or alleles of the SNP are present in the sample. Hybridization and scanning may be carried out as described in PCT application No. WO 92/10092 and WO 95/11995 and U.S. Pat. No. 5,424,186.

[0219] Thus, in some embodiments, the chips may comprise an array of nucleic acid sequences of fragments of about 15 nucleotides in length. In further embodiments, the chip may comprise an array including at least one of the sequences selected from the group consisting of those disclosed in the FIGS. 1, 2, 8, 9, and the sequences complementary thereto, or a fragment thereof, said fragment comprising at least about 8 consecutive nucleotides, preferably 10, 15, 20, more preferably 25, 30, 40, 47, or 50 consecutive nucleotides and containing a polymorphic base. In some embodiments the polymorphic base is within 5, 4, 3, 2, or 1 nucleotides from the center of the polynucleotide, more preferably at the center of said polynucleotide. In other embodiments, the chip may comprise an array containing any number of polynucleotides of the present invention.

[0220] An oligonucleotide may be synthesized on the surface of the substrate by using a chemical coupling procedure and an ink jet application apparatus, as described in PCT application WO95/251116 (Baldeschweiler et al.) which is incorporated herein in its entirety by reference. In another aspect, a “gridded” array analogous to a dot (or slot) blot may be used to arrange and link cDNA fragments or oligonucleotides to the surface of a substrate using a vacuum system, thermal, UV, mechanical or chemical bonding procedures. An array, such as those described above, may be produced by hand or by using available devices (slot blot or dot blot apparatus), materials (any suitable solid support), and machines (including robotic instruments), and may contain 8, 24, 96, 384, 1536, 6144 or more oligonucleotides, or any other number which lends itself to the efficient use of commercially available instrumentation.

[0221] Using such arrays, the present invention provides methods of identifying the SNPs of the present invention in a sample. Such methods comprise incubating a test sample with an array comprising one or more oligonucleotide probes corresponding to at least one SNP position of the present invention, and assaying for binding of a nucleic acid from the test sample with one or more of the oligonucleotide probes. Such assays will typically involve arrays comprising oligonucleotides probes corresponding to many SNP positions and/or allelic variants of those SNP positions, at least one of which is a SNP of the present invention.

[0222] Conditions for incubating a nucleic acid molecule with a test sample vary. Incubation conditions depend on the format employed in the assay, the detection methods employed, and the type and nature of the nucleic acid molecule used in the assay. One skilled in the art will recognize that any one of the commonly available hybridization, amplification or array assay formats can readily be adapted to employ the novel SNPs disclosed herein. Examples of such assays can be found in Chard, T, An Introduction to Radioimmunoassay and Related Techniques, Elsevier Science Publishers, Amsterdam, The Netherlands (1986); Bullock, G. R. et al., Techniques in Immunocytochemistry, Academic Press, Orlando, Fla. Vol. 1 (1982), Vol. 2 (1983), Vol. 3 (1985); Tijssen, P., Practice and Theory of Enzyme Immunoassays: Laboratory Techniques in Biochemistry and Molecular Biology, Elsevier Science Publishers, Amsterdam, The Netherlands (1985).

[0223] The test samples of the present invention include, but are not limited to, nucleic acid extracts, cells, and protein or membrane extracts from cells, which may be obtained from any bodily fluids (such as blood, urine, saliva, phlegm, gastric juices, etc.), cultured cells, biopsies, or other tissue preparations. The test sample used in the above-described methods will vary based on the assay format, nature of the detection method and the tissues, cells or extracts used as the sample to be assayed. Methods of preparing nucleic acid, protein, or cell extracts are well known in the art and can be readily be adapted in order to obtain a sample that is compatible with the system utilized.

[0224] Multicomponent integrated systems may also be used to analyze SNPs. Such systems miniaturize and compartmentalize processes such as PCR and capillary electrophoresis reactions in a single functional device. An example of such technique is disclosed in U.S. Pat. No. 5,589,136, which describes the integration of PCR amplification and capillary electrophoresis in chips.

[0225] Integrated systems can be envisaged mainly when microfluidic systems are used. These systems comprise a pattern of microchannels designed onto a glass, silicon, quartz, or plastic wafer included on a microchip. The movements of the samples are controlled by electric, electroosmotic or hydrostatic forces applied across different areas of the microchip to create functional microscopic valves and pumps with no moving parts. Varying the voltage controls the liquid flow at intersections between the micro-machined channels and changes the liquid flow rate for pumping across different sections of the microchip.

[0226] For genotyping SNPs, the microfluidic system may integrate, for example, nucleic acid amplification, minisequencing primer extension, capillary electrophoresis, and a detection method such as laser induced fluorescence detection.

[0227] In a first step, the DNA samples are amplified, preferably by PCR. Then, the amplification products are subjected to automated minisequencing reactions using ddNTPs (specific fluorescence for each ddNTP) and the appropriate oligonucleotide minisequencing primers which hybridize just upstream of the targeted polymorphic base. Once the extension at the 3′ end is completed, the primers are separated from the unincorporated fluorescent ddNTPs by capillary electrophoresis. The separation medium used in capillary electrophoresis can be, for example, polyacrylamide, polyethyleneglycol or dextran. The incorporated ddNTPs in the single nucleotide primer extension products are identified by laser-induced fluorescence detection. This microchip can be used to process at least 96 to 384 samples, or more, in parallel.

[0228] Vectors/host cells

[0229] The invention also provides vectors containing the nucleic acid molecules described herein. The term “vector” refers to a vehicle, preferably a nucleic acid molecule, that can transport the nucleic acid molecules. When the vector is a nucleic acid molecule, the nucleic acid molecules are covalently linked to the vector nucleic acid. With this aspect of the invention, the vector includes a plasmid, single or double stranded phage, a single or double stranded RNA or DNA viral vector, or artificial chromosome, such as a BAC, PAC, YAC, OR MAC.

[0230] A vector can be maintained in the host cell as an extrachromosomal element where it replicates and produces additional copies of the nucleic acid molecules. Alternatively, the vector may integrate into the host cell genome and produce additional copies of the nucleic acid molecules when the host cell replicates.

[0231] The invention provides vectors for the maintenance (cloning vectors) or vectors for expression (expression vectors) of the nucleic acid molecules. The vectors can function in procaryotic or eukaryotic cells or in both (shuttle vectors).

[0232] Expression vectors contain cis-acting regulatory regions that are operably linked in the vector to the nucleic acid molecules such that transcription of the nucleic acid molecules is allowed in a host cell. The nucleic acid molecules can be introduced into the host cell with a separate nucleic acid molecule capable of affecting transcription. Thus, the second nucleic acid molecule may provide a trans-acting factor interacting with the cis-regulatory control region to allow transcription of the nucleic acid molecules from the vector. Alternatively, a trans-acting factor may be supplied by the host cell. Finally, a trans-acting factor can be produced from the vector itself. It is understood, however, that in some embodiments, transcription and/or translation of the nucleic acid molecules can occur in a cell-free system.

[0233] The regulatory sequence to which the nucleic acid molecules described herein can be operably linked include promoters for directing mRNA transcription. These include, but are not limited to, the left promoter from bacteriophage λ, the lac, TRP, and TAC promoters from E. coli, the early and late promoters from SV40, the CMV immediate early promoter, the adenovirus early and late promoters, and retrovirus long-terminal repeats.

[0234] In addition to control regions that promote transcription, expression vectors may also include regions that modulate transcription, such as repressor binding sites and enhancers. Examples include the SV40 enhancer, the cytomegalovirus immediate early enhancer, polyoma enhancer, adenovirus enhancers, and retrovirus LTR enhancers.

[0235] In addition to containing sites for transcription initiation and control, expression vectors can also contain sequences necessary for transcription termination and, in the transcribed region a ribosome binding site for translation. Other regulatory control elements for expression include initiation and termination codons as well as polyadenylation signals. The person of ordinary skill in the art would be aware of the numerous regulatory sequences that are useful in expression vectors. Such regulatory sequences are described, for example, in Sambrook et al., Molecular Cloning: A Laboratory Manual. 2nd. ed., Cold Spring Harbor Laboratory Press, Cold Spring Harbor, N.Y., (1989).

[0236] A variety of expression vectors can be used to express a nucleic acid molecule. Such vectors include chromosomal, episomal, and virus-derived vectors, for example vectors derived from bacterial plasmids, from bacteriophage, from yeast episomes, from yeast chromosomal elements, including yeast artificial chromosomes, from viruses such as baculoviruses, papovaviruses such as SV40, Vaccinia viruses, adenoviruses, poxviruses, pseudorabies viruses, and retroviruses. Vectors may also be derived from combinations of these sources such as those derived from plasmid and bacteriophage genetic elements, eg. cosmids and phagemids. Appropriate cloning and expression vectors for prokaryotic and eukaryotic hosts are described in Sambrook et al., Molecular Cloning: A Laboratory Manual. 2nd. ed., Cold Spring Harbor Laboratory Press, Cold Spring Harbor, N.Y., (1989).

[0237] The regulatory sequence may provide constitutive expression in one or more host cells (i.e. tissue specific) or may provide for inducible expression in one or more cell types such as by temperature, nutrient additive, or exogenous factor such as a hormone or other ligand. A variety of vectors providing for constitutive and inducible expression in prokaryotic and eukaryotic hosts are well known to those of ordinary skill in the art.

[0238] The nucleic acid molecules can be inserted into the vector nucleic acid by well-known methodology. Generally, the DNA sequence that will ultimately be expressed is joined to an expression vector by cleaving the DNA sequence and the expression vector with one or more restriction enzymes and then ligating the fragments together. Procedures for restriction enzyme digestion and ligation are well known to those of ordinary skill in the art.

[0239] The vector containing the appropriate nucleic acid molecule can be introduced into an appropriate host cell for propagation or expression using well-known techniques. Bacterial cells include, but are not limited to, E. coli, Streptomyces, and Salmonella typhimurium. Eukaryotic cells include, but are not limited to, yeast, insect cells such as Drosophila, animal cells such as COS and CHO cells, and plant cells.

[0240] As described herein, it may be desirable to express the peptide as a fusion protein. Accordingly, the invention provides fusion vectors that allow for the production of the peptides. Fusion vectors can increase the expression of a recombinant protein, increase the solubility of the recombinant protein, and aid in the purification of the protein by acting for example as a ligand for affinity purification. A proteolytic cleavage site may be introduced at the junction of the fusion moiety so that the desired peptide can ultimately be separated from the fusion moiety. Proteolytic enzymes include, but are not limited to, factor Xa, thrombin, and enterokinase. Typical fusion expression vectors include pGEX (Smith et al., Gene 67:31-40 (1988)), pMAL (New England Biolabs, Beverly, Mass.) and pRIT5 (Pharmacia, Piscataway, N.J.) which fuse glutathione S-transferase (GST), maltose E binding protein, or protein A, respectively, to the target recombinant protein. Examples of suitable inducible non-fusion E. coli expression vectors include pTrc (Amann et al., Gene 69:301-315 (1988)) and pET 11d (Studier et al., Gene Expression Technology: Methods in Enzymology 185:60-89 (1990)).

[0241] Recombinant protein expression can be maximized in a host bacteria by providing a genetic background wherein the host cell has an impaired capacity to proteolytically cleave the recombinant protein. (Gottesman, S., Gene Expression Technology: Methods in Enzymology 185, Academic Press, San Diego, Calif. (1990) 119-128). Alternatively, the sequence of the nucleic acid molecule of interest can be altered to provide preferential codon usage for a specific host cell, for example E. coli. (Wada et al., Nucleic Acids Res. 20:2111-2118 (1992)).

[0242] The nucleic acid molecules can also be expressed by expression vectors that are operative in yeast. Examples of vectors for expression in yeast e.g., S. cerevisiae include pYepSec1 (Baldari, et al., EMBO J 6:229-234 (1987)), pMFa (Kurjan et al., Cell 30:933-943(1982)), pJRY88 (Schultz et al., Gene 54:113-123 (1987)), and pYES2 (Invitrogen Corporation, San Diego, Calif.).

[0243] The nucleic acid molecules can also be expressed in insect cells using, for example, baculovirus expression vectors. Baculovirus vectors available for expression of proteins in cultured insect cells (e.g., Sf 9 cells) include the pAc series (Smith et al., Mol. Cell Biol. 3:2156-2165 (1983)) and the pVL series (Lucklow et al., Virology 170:31-39 (1989)).

[0244] In certain embodiments of the invention, the nucleic acid molecules described herein are expressed in mammalian cells using mammalian expression vectors. Examples of mammalian expression vectors include pCDM8 (Seed, B. Nature 329:840(1987)) and pMT2PC (Kaufman et al., EMBO J. 6:187-195 (1987)).

[0245] The expression vectors listed herein are provided by way of example only of the well-known vectors available to those of ordinary skill in the art that would be useful to express the nucleic acid molecules. The person of ordinary skill in the art would be aware of other vectors suitable for maintenance propagation or expression of the nucleic acid molecules described herein. These are found for example in Sambrook, J., Fritsh, E. F., and Maniatis, T. Molecular Cloning: A Laboratory Manual 2nd, ed., Cold Spring Harbor Laboratory, Cold Spring Harbor Laboratory Press, Cold Spring Harbor, N.Y., 1989.

[0246] The invention also encompasses vectors in which the nucleic acid sequences described herein are cloned into the vector in reverse orientation, but operably linked to a regulatory sequence that permits transcription of antisense RNA. Thus, an antisense transcript can be produced to all, or to a portion, of the nucleic acid molecule sequences described herein, including both coding and non-coding regions. Expression of this antisense RNA is subject to each of the parameters described above in relation to expression of the sense RNA (regulatory sequences, constitutive or inducible expression, tissue-specific expression).

[0247] The invention also relates to recombinant host cells containing the vectors described herein. Host cells therefore include prokaryotic cells, lower eukaryotic cells such as yeast, other eukaryotic cells such as insect cells, and higher eukaryotic cells such as mammalian cells.

[0248] The recombinant host cells are prepared by introducing the vector constructs described herein into the cells by techniques readily available to the person of ordinary skill in the art. These include, but are not limited to, calcium phosphate transfection, DEAE-dextran-mediated transfection, cationic lipid-mediated transfection, electroporation, transduction, infection, lipofection, and other techniques such as those found in Sambrook, et al. (Molecular Cloning: A Laboratory Manual. 2nd, ed, Cold Spring Harbor Laboratory, Cold Spring Harbor Laboratory Press, Cold Spring Harbor, N.Y., 1989).

[0249] Host cells can contain more than one vector. Thus, different nucleotide sequences can be introduced on different vectors of the same cell. Similarly, the nucleic acid molecules can be introduced either alone or with other nucleic acid molecules that are not related to the nucleic acid molecules such as those providing trans-acting factors for expression vectors. When more than one vector is introduced into a cell, the vectors can be introduced independently, co-introduced or joined to the nucleic acid molecule vector.

[0250] In the case of bacteriophage and viral vectors, these can be introduced into cells as packaged or encapsulated virus by standard procedures for infection and transduction. Viral vectors can be replication-competent or replication-defective. In the case in which viral replication is defective, replication will occur in host cells providing functions that complement the defects.

[0251] Vectors generally include selectable markers that enable the selection of the subpopulation of cells that contain the recombinant vector constructs. The marker can be contained in the same vector that contains the nucleic acid molecules described herein or may be on a separate vector. Markers include tetracycline or ampicillin-resistance genes for prokaryotic host cells and dihydrofolate reductase or neomycin resistance for eukaryotic host cells. However, any marker that provides selection for a phenotypic trait will be effective.

[0252] While the mature proteins can be produced in bacteria, yeast, mammalian cells, and other cells under the control of the appropriate regulatory sequences, cell-free transcription and translation systems can also be used to produce these proteins using RNA derived from the DNA constructs described herein.

[0253] Where secretion of the peptide is desired, which is difficult to achieve with multi-transmembrane domain containing proteins such as estrogen receptors, appropriate secretion signals are incorporated into the vector. The signal sequence can be endogenous to the peptides or heterologous to these peptides.

[0254] Where the peptide is not secreted into the medium, which is typically the case with estrogen receptors, the protein can be isolated from the host cell by standard disruption procedures, including freeze thaw, sonication, mechanical disruption, use of lysing agents and the like. The peptide can then be recovered and purified by well-known purification methods including ammonium sulfate precipitation, acid extraction, anion or cationic exchange chromatography, phosphocellulose chromatography, hydrophobic-interaction chromatography, affinity chromatography, hydroxylapatite chromatography, lectin chromatography, or high performance liquid chromatography.

[0255] It is also understood that depending upon the host cell in recombinant production of the peptides described herein, the peptides can have various glycosylation patterns, depending upon the cell, or maybe non-glycosylated as when produced in bacteria. In addition, the peptides may include an initial modified methionine in some cases as a result of a host-mediated process.

[0256] Uses of vectors and host cells

[0257] The recombinant host cells expressing the peptides described herein have a variety of uses. First, the cells are useful for producing a estrogen receptor protein or peptide that can be further purified to produce desired amounts of estrogen receptor protein or fragments. Thus, host cells containing expression vectors are useful for peptide production.

[0258] Host cells are also useful for conducting cell-based assays involving the estrogen receptor protein or estrogen receptor protein fragments, such as those described above as well as other formats known in the art. Thus, a recombinant host cell expressing a native estrogen receptor protein is useful for assaying compounds that stimulate or inhibit estrogen receptor protein function.

[0259] Host cells are also useful for identifying estrogen receptor protein mutants in which these functions are affected. If the mutants naturally occur and give rise to a pathology, host cells containing the mutations are useful to assay compounds that have a desired effect on the mutant estrogen receptor protein (for example, stimulating or inhibiting function) which may not be indicated by their effect on the native estrogen receptor protein.

[0260] Genetically engineered host cells can be further used to produce non-human transgenic animals. A transgenic animal is preferably a mammal, for example a rodent, such as a rat or mouse, in which one or more of the cells of the animal include a transgene. A transgene is exogenous DNA which is integrated into the genome of a cell from which a transgenic animal develops and which remains in the genome of the mature animal in one or more cell types or tissues of the transgenic animal. These animals are useful for studying the function of a estrogen receptor protein and identifying and evaluating modulators of estrogen receptor protein activity. Other examples of transgenic animals include non-human primates, sheep, dogs, cows, goats, chickens, and amphibians.

[0261] A transgenic animal can be produced by introducing nucleic acid into the male pronuclei of a fertilized oocyte, e.g., by microinjection, retroviral infection, and allowing the oocyte to develop in a pseudopregnant female foster animal. Any of the estrogen receptor protein nucleotide sequences can be introduced as a transgene into the genome of a non-human animal, such as a mouse.

[0262] Any of the regulatory or other sequences useful in expression vectors can form part of the transgenic sequence. This includes intronic sequences and polyadenylation signals, if not already included. A tissue-specific regulatory sequence(s) can be operably linked to the transgene to direct expression of the estrogen receptor protein to particular cells.

[0263] Methods for generating transgenic animals via embryo manipulation and microinjection, particularly animals such as mice, have become conventional in the art and are described, for example, in U.S. Pat. Nos. 4,736,866 and 4,870,009, both by Leder et al., U.S. Pat. No. 4,873,191 by Wagner et al. and in Hogan, B., Manipulating the Mouse Embryo, (Cold Spring Harbor Laboratory Press, Cold Spring Harbor, N.Y., 1986). Similar methods are used for production of other transgenic animals. A transgenic founder animal can be identified based upon the presence of the transgene in its genome and/or expression of transgenic mRNA in tissues or cells of the animals. A transgenic founder animal can then be used to breed additional animals carrying the transgene. Moreover, transgenic animals carrying a transgene can further be bred to other transgenic animals carrying other transgenes. A transgenic animal also includes animals in which the entire animal or tissues in the animal have been produced using the homologously recombinant host cells described herein.

[0264] In another embodiment, transgenic non-human animals can be produced which contain selected systems that allow for regulated expression of the transgene. One example of such a system is the cre/loxP recombinase system of bacteriophage P1. For a description of the cre/loxP recombinase system, see, e.g., Lakso et al. PNAS 89:6232-6236 (1992). Another example of a recombinase system is the FLP recombinase system of S. cerevisiae (O'Gorman et al. Science 251:1351-1355 (1991). If a cre/loxP recombinase system is used to regulate expression of the transgene, animals containing transgenes encoding both the Cre recombinase and a selected protein is required. Such animals can be provided through the construction of “double” transgenic animals, e.g., by mating two transgenic animals, one containing a transgene encoding a selected protein and the other containing a transgene encoding a recombinase.

[0265] Clones of the non-human transgenic animals described herein can also be produced according to the methods described in Wilmut, I. et al. Nature 385:810-813 (1997) and PCT International Publication Nos. WO 97/07668 and WO 97/07669. In brief, a cell, e.g., a somatic cell, from the transgenic animal can be isolated and induced to exit the growth cycle and enter G₀ phase. The quiescent cell can then be fused, e.g., through the use of electrical pulses, to an enucleated oocyte from an animal of the same species from which the quiescent cell is isolated. The reconstructed oocyte is then cultured such that it develops to morula or blastocyst and then transferred to pseudopregnant female foster animal. The offspring born of this female foster animal will be a clone of the animal from which the cell, e.g., the somatic cell, is isolated.

[0266] Transgenic animals containing recombinant cells that express the peptides described herein are useful to conduct the assays described herein in an in vivo context. Accordingly, the various physiological factors that are present in vivo and that could effect ligand binding, estrogen receptor protein activation, and signal transduction, may not be evident from in vitro cell-free or cell-based assays. Accordingly, it is useful to provide non-human transgenic animals to assay in vivo estrogen receptor protein function, including ligand interaction, the effect of specific mutant estrogen receptor protein on estrogen receptor protein function and ligand interaction, and the effect of chimeric estrogen receptor protein. It is also possible to assess the effect of null mutations, that is mutations that substantially or completely eliminate one or more estrogen receptor protein functions.

### EXAMPLES

[0267] 1. SNP Identification and Characterization

[0268] Individual exons of estrogen receptor alpha (ESR1) were PCR amplified using primers flanking each adjacent sequence of exon (exon/intron boundaries), and the sequence of amplified fragments was analyzed. As the PCR template, genomic DNA from Coriell Diversity Panels (10 individuals in each of 5 ethnic groups) (see FIG. 2 (b)), and/or Liverpool clinical breast tumor and matching blood samples from 48 patients (from tissue obtained in Liverpool, England, see FIG. 2 (a)) was used. PolyPhred version 2.0 (D. A. Nickerson, S. Taylor, N. Kolker, Univ. of Washington, 1998) was run on the sequences (with default settings) to visualize potential heterozygotes. Tagged sites were examined for quality to verify polymorphisms.

[0269] 36 SNPs with a frequency greater than 2 and a quality score greater than 20 were found with 13 being unique to the clinical samples. 15 of the SNPs showed at least one instance of a change in heterozygosity in the clinical samples, and 4 showed at least one instance of a loss in heterozygosity. For the analysis, PCR primers were used for SNP identification and detection (see FIG. 2 (e))

[0270] Additionally, the primer set in FIG. 2(d) and M13 primers were used for overlapping PCR and clone sequencing.

TABLE 1
Summary of SNPs found in the clinical samples.
All SNPs had a frequency greater than 2 and a
quality score greater than 20 (see FIG. 8).

| | |
|---|---|
| Number of SNPs | 39 |
| Number in Liverpool | 34 |
| Number in Coriell | 26 |
| Number unique to Coriell | 5 |
| Number unique in Liverpool | 12 |

[0271] TABLE 2
Summary of changes in heterozygosity in clinical samples.
SNPs had a frequency greater than two and a quality score
greater than 20 (See FIG. 8).

| | |
|---|---|
| Number of Liverpool SNPs | 15 |
| With >1 Change in Heterozygosity | |
| Number of Liverpool SNPs | 4 |
| With >1 case of Loss of Heterozygosity | |

[0272] FIG. 2 (c) included analysis SNPs in Liverpool control population vs. blood or tumor populations. There were 23 sites that were typed in both cases and controls.

[0273] FIG. 5 shows the domain structure of the ESR1 protein and the position of many of the SNPs disclosed herein. FIG. 6 provides a graphical representation of the SNPs and frequency of occurance in the samples tested.

[0274] FIG. 8 (a)(1) shows the SNPs and frequency of occurance in Coriell Samples wherein the samples are collected from Northern European, Chinese, Indo-Pakistani, Africa American and Southwestern Native American ethnic groups. In 3′ flanking Exon 8, the positions of the SNPs are based on the sequence of AL078582 that is in Genbank. The result can be used for detection purposes among the specific ethnic groups. FIG. 8 (a)(2) shows the genotyping of SNP on cite 167989 (intron 1D, #9) in the Coriell panel. This panel comprises 100 Caucasians, wherein 51 are males and 49 are females. The result shows that the frequency of the minor allele is 9%.

[0275] FIG. 8 (b)(1) shows the SNPs and frequence of occurance in Liverpool samples wherein the samples are selected from the groups of blood samples and breast cancer samples from Norther Europeans.

[0276] FIG. 8 (b)(2) shows the Taq Man genotyping results for SNP cite 167, 989 (intron 1D, #9) in additional 60 Liverpool patients. The result shows that the frequency of the minor allele (G) was 14% in blood and 10% in tumors. This is similar to the SNP genotyping in Coriell samples shown in FIG. 8(b)(1), wherein the frequency at the minor allele was 16% in blood and 17% in tumors. The Liverpool control population (95 cases) shows that the frequency at the minor allele was 10.5% (FIG. 2(c)).

[0277] 2. Haplotype Analysis

[0278] The method developed for SNP discovery was designed to recover haplotype data. SNPs could be associated into a specific haplotype. The sample cDNA was from a random population present in unknown proportions. SNPs coming from a specific clone were clustered and built into haplotyes.

[0279] Data consist of two sample types (FIG. 4(a) and (b)). Liverpool samples are from 48 patients, and each patient had a tumor and blood sample typed. Coriell samples were controls, but they were not matched controls. Rather they included a mix of Europeans, Chinese, Indo-Pakistani, and African Americans. 46 SNPs in ESR1 were scored in the Liverpool samples. The same 46 SNPs plus an additional 6 SNPs at 3′ of the RSR1 gene were scored in the Coriell sample.

[0280] These data were subjected to an analysis to infer the most likely haplotype phase of the individuals. The results appear in FIG. 4 (a) where each haplotype has a number and the number after the dash is a count (or frequency) of that haplotype.

[0281] FIG. 4 (b) is the non-singleton haplotype data that were fitted to a neighbor-joining tree. If a tree were cut at the arrow, the clade including 3L, 10-4, . . . 73L would be partitioned from the rest of the tree, as “Clade X”. The following table will illustrate a difference in the incidence of tumors in haplotypes on Clade X vs. the rest of the tree. The incidence of each haplotype was first counted by adding the numbers after the dashes, wherein L represented the tumorous Liverpool samples and the non-L represented Coriell controls.

| | Clade X | Rest of tree |
|---|---|---|
| Tumor | 49 | 64 |
| Control | 4 | 49 |

[0282] A Chi-square was calculated based on the 2×2 table as of 21.29, which, with one degree of freedom that has a probability less than 0.0001. Therefore, the Clade X of the ER1 gene has a much greater chance of being associated with a tumor. This entire lade is so rare elsewhere in the world. Even among Europeans, it was present only once out of 20 haplotypes.

[0283] The sites that identified the clade with a large frequency difference between Coriell controls, Liverpool controls, Liverpool tumor samples were:

| | | | | | |
|---|---|---|---|---|---|
| 5 | ESR1-exon 1A | 170487; | 9 | ESR1-intron 1D | 167989; |
| 11 | ESR1-exon 1E | 64331; | 17 | ESR1-exon Intrn 3 | 243187; |
| 20 | ESR1-exon 4 | 306382; | 24 | ESR1-exon Intrn 6 | 423220; |
| 28 | ESR1-exon Intrn 7 | 459832; | 29 | ESR1-intron 7 | 459913; |
| 35 | ESR1-exon 8 | 460929; | 45 | ESR1-exon 8 | 462949 |

[0284] 3. Promoter region and SNP on Estrogen receptor 1

[0285] CAAT and TATA boxes are found in the first 200 b.p. of the sequence and a distance between them lead to believe that they might be functional as a basal promoter.

[0286] The distance between CAAT-TATA sites and actual identified start of transcription is about 300 b.p. (usually it is about 20-40 b.p.) and this region contains multiple TF sites such NFAT, NFKB, SP1-family, CEBP and EBOX, majority of them involved in a differential (tissue, cell type) regulation of expression.

[0287] Region with T (SNP) has interesting properties. Not only it has conservative (TC)6-repeat, but also (CA)6 on the 5-prime. A conservative motif for is CACAYTCTC at the same region. There is no significant match from known TF sites to this region, and it is likely to be a novel TF site. Very close to T (SNP) is TF site called AHRARNT_{—}02 for aryl hydrocarbon/Arnt heterodimers. It is possible that CACAYTCTC site is either a binding point for the co-factor or help to properly position Arnt complex. It is also known that a single mutation in TF-binding site could decrease affinity of the protein binding several folds and as such may lead into a disease pathway.

[0288] In the present invention, the SNP occurs just 13 bp upstream of exon 1C in a short GA repeat (GAGAGAGA). Among SNPs of interest in the clades (FIG. 4), three are silent mutations, one is in the 3′ UTR, and the rest are in intron regions.

[0289] The important T to G SNP (#9) is in the site 167989 (Intron ID) of the promoter region (FIG. 2 (a), (b), and (c)). Loss of a gene copy is associated with cancer risk. A promoter mutation that decreases gene expression could cause a similar effect.

[0290] G- to T transversion is in an alternate promoter site. There is some effect on estrogen physiology, possible on overall levels of signaling at the nucleus. The predition would be that the “effect” of the relevant clade (and cladistic haplytypes) (FIG. 4) is to increase overall estrogen receptor sensitivity and responsiveness or possible to lead in the direction of alternative growth processes that cycle in the direction of unregulated (non-physiologic) growth signals. Estrogen exposure plays a critical role in breast cancer causation in virtually every epidemiologic study.

[0291] In addition, the TF binding sites and SNPs were detected in the ESR1 gene wherein 5 SNPs occured in transcription binding sites as shown below:

| SNP position | Gene structure | Transcription factor |
|---|---|---|
| 167989 | intron 1D | PAX-3 |
| 64331 | exon 1E | CDP |
| 423220 | intron 6 | MEF-2 |
| 423232 | intron 6 | MEF-2 |
| 423258 | intron 6 | SRF, AGL3 |

[0292] 4. ESR1 Genomic Sequencing—The Complete Genomic Structure of Estrogen Receptor alpha

[0293] Estrogen receptor (ER) is a member of the nuclear hormone receptor gene superfamily. This family of genes is characterized by a modular structure with three distinct domains: a variable (N)-terminal domain, a highly conserved DNA binding domain, and a conserved (C)-terminal domain (reviewed in 1, 2). Functionally, the (N)-terminus domain regulates transactivation, the DNA binding domain regulates dimerization and DNA binding, and the (C)-terminus domain regulates transactivation, dimerization, ligand binding, nuclear translocation, silencing, and Heat Shock Protein binding. It was shown that the functions of the individual domains of the nuclear hormone gene superfamily are independent of the receptor in which they are found, and that the domains retain their function even when placed into different heterologous proteins (3, 4, 5). The domain modularity in the nuclear hormone receptor gene superfamily exists because the major subfamilies of these genes evolved through a simple gene duplication early in evolution (6). The nuclear hormone receptor gene family can be separated according to two different classification schemes, one based on hormone binding, the other based on dimerization and how the receptors bind to their respective DNA response elements (for a review, see 2).

[0294] The cDNA for ERα was first cloned and sequenced from the MCF-7 breast cancer cell line and was found to have 27% identity and 41% conservation to the v-erb-A gene (7). ERα was mapped to chromosome 6q25.1 using Fluorescence In Situ Hybridization (FISH) and chromosome banding (8). In 1996, a novel estrogen receptor (ERβ) was identified by degenerate PCR (9) and mapped to 14q22-24 by FISH (10). ERα and ERβ were shown to have 96% sequence identity in the DNA binding domain, 58% identity in the ligand-binding domain, and low similarity in the 5′ and 3′ ends as well as in the hinge (domain D). A variety of ERα and ERβ variants have since been described, including single and multiple exon deletions, truncated transcripts, and transcripts containing insertions (11, 12, 13). These variants were isolated from a variety of sources, including normal tissues, tumor tissues and cell lines. The ER status of tumors in breast cancer patients has been used as an indicator of response to endocrine therapy (14, 15), and many studies have examined the role of ER in breast cancer tumor progression, ER-negative status, and hormone antagonist resistance (for a complete review, see 16).

[0295] Because of the importance of the ER gene, we set about to clone it in its entirety and determine its complete structure. Initially, we used standard Bacterial Artificial Chromosome (BAC) sequencing to generate sequence information for the coding regions of the genes. As Celera's sequencing of the human genome progressed, the remaining regions of ER were filled in using Celera regional assemblies. A small region of less than 25 kb was filled in on ERα using a public BAC (A1353611.6, positions 1,497-25,941)

[0296] Materials and Methods

[0297] 1) BAC Screening

[0298] Appropriate markers were designed for ERα and ERβ exons and used to obtain commercially available BAC clones from Research Genetics (Huntsville, Ala.). A number of positive BACs were selected and individual clones were re-screened for verification.

[0299] 2) DNA Isolation and Library Preparation

[0300] BAC DNA was isolated from verified clones using QIAGEN columns (QIAGEN, Inc., Valencia, Calif.) according to the manufacturer's specifications. Shotgun libraries were prepared following standard protocols (17). Briefly, isolated BAC DNA was sonicated, polished, and size fractionated. Size selected DNA fragments were then subcloned into pUC19 using standard ligation techniques. Ligated DNA was transformed into Electrocompetent cells (Life Technologies, Rockville, Md.) and grown overnight.

[0301] 3) DNA Sequencing and Annotation

[0302] Sequencing reactions were performed using Big Dye Terminator chemistry (Applied Biosystems, Foster City, Calif.) and run on an ABI PRISM 3700 DNA Analyzer (Applied Biosystems). Phred (18), Phrap and Consed (19) were used for base calling, assembly, and finishing, respectively. Exon locations were determined using Cross_Match to compare the published gene sequences to the genomic contig.

[0303] Results

[0304] 1. Estrogen Receptor α

[0305] Alignment of the genomic sequence for ERα and published mRNA sequences for ERα show the gene consists of 14 exons and covers 446,296 bp of genomic sequence (FIG. 7, Table 3).

[0306] 2. Estrogen Receptor β

[0307] Alignment of the genomic sequence for ERβ and published mRNA sequences for ERβ show the gene consists of 17 exons and covers 253,748 bp of genomic sequence (FIG. 2, table 1). By analysis with the Celera Genome Browser, we were able to identify a gene, human synaptic nuclei expressed gene 2 (syne-2, accession number NM_{—}015180.1), that is completely contained within intron 9 of ERβ, on the opposite strand. Further analysis of the syne-2 gene showed it consists of 21 exons, and covers 51,471 bp of genomic sequence.

[0308] Discussion

[0309] Alignment of the complete ERα genomic sequence and various ERβ transcripts shows that the gene covers 446,296 bp of genomic sequence and consists of 14 exons. The alignment of the published sequence for exon 1E (AJ002561) (20) and the ER α genomic sequence revealed that exon 1E actually consists of two separate exons. The newly delineated exon is referred to here as exon 1G to conform to the naming convention previously established. Exon 1G is located approximately 45 kb upstream of exon 1E and conforms to the GT/AG splice site consensus sequence (FIG. 1, table 1).

[0310] Alignment of the various ERβ transcripts to the complete ERβ genomic sequence reveals a more complex organization than was previously accepted (13). The 5′ UTR of the ERβcx variant (AB006589) actually consists of seven untranslated exons (referred to here as exons −1 through −7), all of which conform to the GT/AG splice site consensus sequence (FIG. 2, table 1). Sequence alignment of ERβ variants AF061055 and AF061054 (12) showed that these transcripts both contain intron sequence and were probably partially mature transcripts. Both of these partially mature transcripts contain exon 7 and a portion of exon 9, but do not conform to the splice site consensus sequence at the sites where intron sequence is present.

[0311] By examining the ER genomic sequences using the Celera Genome Browser, we were able to identify a separate gene contained entirely within intron 9 of ERβ. This gene was identified as human synaptic nuclei expressed gene 2 (syne-2) and was shown to cover over 50 Kb of genomic sequence and consist of 21 exons, all of which conform to the GT/AG splice site consensus sequence (Table 4). The syne-2 gene is located on the antisense strand of ERβ.

[0312] Completion of the sequence and structures for ERα and ERβ should contribute to further understanding and characterization of these important receptors.

TABLE 3
Exon-Intron Boundaries and Locations in the Human
Estrogen Receptor: Exon sequences are shown in
upper case and intron sequences are shown in
lower case. Splice sites are shown in bold.

| | | | | | | | | |
|---|---|---|---|---|---|---|---|---|
| | | | | | | | | Intron |
| | Exon | Splice | Contig | Contig | | | Exon Size | size |
| Gen | no. | varient | start | end | 5′ splice donor | 3′ splice acceptor | (bp) | (Kb) |

| | | | | | | | | |
|---|---|---|---|---|---|---|---|---|
| ER1 | 1G | AJ002561 | 18941 | 19032 | - | ACCAAAGAAGgtaagttttt | 91 | 33.79 |
| | 1F | AJ002562 | 52818 | 52940 | - | TTCTCTTCAAgtaggtactc | 122 | 11.21 |
| | 1E | AJ002561 | 64150 | 64280 | aaaacaaaagGAAGAAGAAA | CATCACTGAGgtatgtgtga | 130 | 101.95 |
| | 1D | AJ002560 | 166228 | 166322 | - | GAGAGAGCCAgtaagtcacg | 94 | 1.68 |
| | 1C | X62462 | 168002 | 168120 | - | ATCCAGCAGGgtaggcttgt | 118 | 1 55 |
| | 1B | AJ002559 | 169674 | 169825 | - | GACAAGTAAAgtaaagttca | 151 | 0 04 |
| | 1A | X03635 | 169867 | 170678 | - | CATTCTACAGgtacccgcgc | 811 | 34.23 |
| | 2 | X03635 | 204912 | 205102 | ttccccccagGCCAAATTCA | AGTATTCAAGgtaatagtgt | 190 | 37.87 |
| | 3 | X03635 | 242970 | 243086 | cttttaatagGACATAACGA | ATGAAAGGTGgtaggtacat | 116 | 63.08 |
| | 4 | X03635 | 306168 | 306503 | gtgttttcagGGATACGAAA | AGGGTGCCAGgtaagaatgc | 335 | 67.14 |
| | 5 | X03635 | 373640 | 373778 | ttgttttcagGCTTTGTGGA | TCTTGGACAGgtaagtgacc | 138 | 49 19 |
| | 6 | X03635 | 422964 | 423097 | gttttcatagGAACCAGGGA | CTTAATTCTGgtgagttgat | 133 | 33.26 |
| | 7 | X03635 | 456354 | 456537 | gcgcattcagGAGTGTACAC | GGCACATGAGgtgaggcatc | 183 | 4.16 |
| | 8 | X03635 | 460701 | 465237 | ccacctacagTAACAAAGGC | - | 4536 | - |
| ER2 | −7 | AB006589 | 49552 | 49750 | - | GGTTCTGAAGgtgcgtggtt | 198 | 1.18 |
| | −6 | AB006589 | 50928 | 51235 | tgcctcttagACATCCAAGT | TGTTTGTAAGgtaataaaaa | 307 | 32.62 |
| | −5 | AB006589 | 83858 | 84041 | tatccactagAGGGAGACAT | GAGAACACAGgtgaacttca | 183 | 1.90 |
| | −4 | AB006589 | 85942 | 86154 | ctctccatagAAATCCTGGC | ATTAGCCCTGgtaaggagct | 212 | 2.88 |
| | −3 | AB006589 | 89037 | 89130 | cattcaacagTATCTGGGCT | GTGCAGGTAGgtaggtaaag | 93 | 0.67 |
| | −2 | AB006589 | 89803 | 89988 | ccttttacagGGTTTTGTTT | GTGTTGACAGgtaagatqag | 185 | 3.12 |
| | −1 | AF060555 | 93111 | 93488 | - | TATCTGCAAGgtaagcgccc | 377 | 10.96 |
| | 1 | AF060555 | 104446 | 104897 | ttctttacagCCATTATACT | CTGTAAACAGgtaagtccag | 451 | 2.47 |
| | 2 | AF060555 | 107368 | 107540 | tgctccctagAGAGACACTG | AGCATTCAAGgtacaagaga | 172 | 11.07 |
| | 3 | AF060555 | 118610 | 118726 | tctgctatagGACATAATGA | CTGAAGTGTGgtgagtgctt | 116 | 8.05 |
| | 4 | AF060555 | 126774 | 127073 | tcctcttcagGCTCCCGGAG | AAGATTCCCGgtagggcttt | 299 | 3.09 |
| | 5 | AF060555 | 130158 | 130296 | ctttccccagGCTTTGTGGA | TTCTGGACAGgtgagaaaaa | 138 | 7.56 |
| | 6 | AF060555 | 137853 | 137986 | acttttgtagGGATGAGGGG | CTCAATTCCAgtaaqtaatc | 133 | 14.39 |
| | 7 | AF060555 | 152379 | 152559 | ctttgtccagGTATGTACCC | GGCATGCGAGgtacgcgccc | 180 | 1.65 |
| | 8 | X99101 | 154206 | 154500 | gtccccatagTAACAAGGGC | - | 826 | 5.42 |
| | 9 | AB006589 | 159915 | 160827 | tctacttaagGGCAGAAAAG | - | 912 | 141.65 |
| | 10 | AF060555 | 302474 | 303300 | gtcttgacagCTCTCTCTCA | - | 826 | - |

[0313] TABLE 4
Exon-Intron Boundaries and Locations in the Human
Synaptic Nuclei Expressed Gene 2. Exon sequences
are shown in upper case and intron sequences are
shown in lower case. Splice sites are shown in bold.

| | | | | | | | | |
|---|---|---|---|---|---|---|---|---|
| | | | | | | | Exon | Intron |
| | Exon | Splice | Contig | Contig | | | Size | size |
| Gene | no. | varient | start | end | 5′ splice donor | 3′ splice acceptor | (bp) | (Kb) |

| | | | | | | | | |
|---|---|---|---|---|---|---|---|---|
| Syne-2 | 1 | NM_015180 | 212563 | 212391 | - | CACTGTAGAGgtaaactcac | 172 | 2.22 |
| | 2 | NM_015180 | 210175 | 210044 | tttcaaatagACCTGGGACC | GCTGATTAAGgtattgaaat | 131 | 8.94 |
| | 3 | NM_015180 | 201109 | 200946 | ttaaatgcagGAACTAGAAC | CTGCTTAAGGgtaagtcagc | 163 | 1.97 |
| | 4 | NM_015180 | 198981 | 198811 | tcatttgcagGTGGCCATAC | GTTACAGAAGgtaagggagg | 162 | 1.36 |
| | 5 | NM_015180 | 197462 | 197290 | cctttgccagGACTGCATGG | TCGGATCAAGgtaagaaatg | 172 | 12.56 |
| | 6 | NM_015180 | 184732 | 184564 | atatgtgtagGGTGAAGAAG | TGAGCAGCAGgtgggacaat | 168 | 5.79 |
| | 7 | NM_015180 | 178771 | 178584 | gtaatcacagGATCTACAGC | GGCCCATGAAgtaagaacta | 193 | 0.48 |
| | 8 | NM_015180 | 178101 | 177949 | ctcccatcagAATCGAGGAG | GAGGTTTGAGgtaaacacct | 152 | 0.36 |
| | 9 | NM_015180 | 177591 | 177405 | tgtqatgcagGCCTTTCACC | CAGACTCAGGgtgagctcct | 186 | 1.84 |
| | 10 | NM_015180 | 175570 | 175429 | acttttgcagCATTTCACGA | CCAACTGAATgtgagggctg | 141 | 0.71 |
| | 11 | NM_015180 | 174718 | 174522 | ctctcaacagGGCTTGCAAC | CTGCACTCCGgtacggqcac | 196 | 1.19 |
| | 12 | NM_015180 | 173337 | 173051 | tgtggtttagGGCTTGGAAC | GCACTGTCAGgtaacagctg | 286 | 1.76 |
| | 13 | NM_015180 | 171289 | 171140 | ttcgtttcagGTAAATCCAT | ACCACCCTATgtaagtctta | 149 | 2.00 |
| | 14 | NM_015180 | 169139 | 169011 | ctcattctagGGAAAGCTAC | CAGCAGTCAGgtactgcctg | 126 | 0.69 |
| | 15 | NM_015180 | 168327 | 168117 | ttaattccagGTGCCTTCGA | GAGACTGCAGgtgagttaga | 210 | 1 02 |
| | 16 | NM_015180 | 167096 | 166890 | tctctggtagGAGATACTGA | GCAGTGCCAGgtacgctgac | 206 | 0.93 |
| | 17 | NM_015180 | 165957 | 165825 | gttttttaagGACTTCCACC | GGAACTAATGgtaagtttcc | 132 | 1.48 |
| | 18 | NM_015180 | 164342 | 164149 | ctgttttcagCAACTGGAAA | GGCAACCCAGgtgagtctac | 193 | 1.08 |
| | 19 | NM_015180 | 163074 | 162982 | tgaatttcagAACCCAGCCT | CCGAGCAAAGgtaagaagcc | 92 | 0.45 |
| | 20 | NM_015180 | 162537 | 162482 | ctttacccagCAGTTCAGAG | CAGAGAGCAGgtaacggggc | 55 | 0.27 |
| | 21 | NM_015180 | 162214 | 161092 | ctgttggcagGGTCCCCGGC | - | 1122 | - |

[0314] References

[0315] 1. Ribeiro R C, Kushner P J, Baxter J D, Tenbaum S, Baniahmad A. The nuclear hormone receptor gene superfamily. Annu Rev Med 1995;46:443-53.

[0316] 2. Tenbaum S, Baniahmad A. Nuclear receptors: structure, function and involvement in disease. Int J Biochem Cell Biol. 1997 Dec;29(12):1325-41.

[0317] 3. Baniahmad C, Baniahmad A, O'Malley B W. A rapid method combining a functional test of fusion proteins in vivo and their purification. Biotechniques. February 1994; 16(2): 194-6.

[0318] 4. Parker M G, White R. Nuclear receptors spring into action. Nat Struct Biol. February 1996;3(2):113-5.

[0319] 5. Schwabe J W. Transcriptional control: how nuclear receptors get turned on. Curr Biol. 1996 Apr 1;6(4):372-4.

[0320] 6. Laudet V, Hanni C, Coll J, Catzeflis F, Stehelin D. Evolution of the nuclear receptor gene superfamily. EMBO J. March 1992; 11(3):1003-13.

[0321] 7. Green S, Walter P, Kumar V, Krust A, Bornert J M, Argos P, Chambon P. Human oestrogen receptor cDNA: sequence, expression and homology to v-erb-A. Nature. March 1986 13-19;320(6058):134-9.

[0322] 8. Menasce L P, White G R, Harrison C J, Boyle J M. Localization of the estrogen receptor locus (ESR) to chromosome 6q25.1 by FISH and a simple post-FISH banding technique. Genomics 1993 Jul;17(1):263-5.

[0323] 9. Mosselman S, Polman J, Dijkema R. ER beta: identification and characterization of a novel human estrogen receptor. FEBS Lett. 1996 Aug 19;392(1):49-53.

[0324] 10. Enmark E, Pelto-Huikko M, Grandien K, Lagercrantz S, Lagercrantz J, Fried G, Nordenskjold M, Gustafsson J A. Human estrogen receptor beta-gene structure, chromosomal localization, and expression pattern. J Clin Endocrinol Metab. 1997 Dec;82(12):4258-65.

[0325] 11. Murphy L C, Dotzlaw H, Leygue E, Douglas D, Coutts A, Watson P H. Estrogen receptor variants and mutations. J Steroid Biochem Mol Biol. 1997 Aug;62(5-6):363-72.

[0326] 12. Moore J T, McKee D D, Slentz-Kesler K, Moore L B, Jones S A, Home E L, Su J L, Kliewer S A, Lehmann J M, Willson T M. Cloning and characterization of human estrogen receptor beta isoforms. Biochem Biophys Res Commun. 1998 Jun 9;247(1):75-8.

[0327] 13. Ogawa S, Inoue S, Watanabe T, Orimo A, Hosoi T, Ouchi Y, Muramatsu M. Molecular cloning and characterization of human estrogen receptor betacx: a potential inhibitor of estrogen action in human. Nucleic Acids Res. 1998 Aug 1;26(15):3505-12.

[0328] 14. Osborne C K, Yochmowitz M G, Knight W A 3d, McGuire W L. The value of estrogen and progesterone receptors in the treatment of breast cancer. Cancer 1980 Dec 15;46(12 Suppl):2884-8.

[0329] 15. DeSombre E R, Carbone P P, Jensen E V, McGuire W L, Wells S A Jr, Wittliff J L, Lipsett M Special report. Steriod receptors in breast cancer. N Engl J Med 1979 Nov 1;301(18):1011-2.

[0330] 16. Parl, Fritz F., Estrogens, Estrogen receptor, and Breast Cancer. IOS Press, Amsterdam, Netherlands, 2000.

[0331] 17. Birren B, Green E D, Klapholz S, Myers, R, Riethman H, Roskams J, (eds.) (1997), Genome Analysis: A Laboratory Manual. Cold Spring Harbor Laboratory Press, Cold Spring Harbor, N.Y.

[0332] 18. Ewing B, Hillier L, Wendl M C, Green P. Base-calling of automated sequencer traces using phred. I. Accuracy assessment. Genome Res March 1998;8(3):175-85.

[0333] 19. Gordon D, Abajian C, Green P. Consed: a graphical tool for sequence finishing. Genome Res March 1998;8(3):195-202.

[0334] 20. Flouriot G, Griffin C, Kenealy M, Sonntag-Buck V, Gannon F. Differentially expressed messenger RNA isoforms of the human estrogen receptor-alpha gene are generated by alternative splicing and promoter usage. Mol Endocrinol December 1998;12(12):1939-54.

[0335] All publications and patents mentioned in the above specification are herein incorporated by reference. Various modifications and variations of the described method and system of the invention will be apparent to those skilled in the art without departing from the scope and spirit of the invention. Although the invention has been described in connection with specific preferred embodiments, it should be understood that the invention as claimed should not be unduly limited to such specific embodiments. Indeed, various modifications of the above-described modes for carrying out the invention which are obvious to those skilled in the field of molecular biology or related fields are intended to be within the scope of the following claims.

That which is claimed is:

1. An isolated peptide consisting of an amino acid sequence selected from the group consisting of:
(a) the amino acid sequence of a variant estrogen receptor protein provided in FIG. 2;
(b) a fragment of the amino acid sequence of a variant estrogen receptor protein provided in FIG. 2, wherein the fragment comprises at least 10 contiguous amino acids.

2. An isolated peptide comprising an amino acid sequence selected from the group consisting of:
(a) the amino acid sequence of a variant estrogen receptor protein provided in FIG. 2;
(b) a fragment of the amino acid sequence of a variant estrogen receptor protein provided in FIG. 2, wherein the fragment comprises at least 10 contiguous amino acids.

3. An isolated antibody that selectively binds to a peptide of claim 1.

4. An isolated nucleic acid molecule consisting of a nucleotide sequence selected from the group consisting of:
(a) a nucleotide sequence that encodes the amino acid sequence of a variant estrogen receptor protein provided in FIG. 2;
(b) a nucleotide sequence that encodes a fragment of the amino acid sequence of a variant estrogen receptor protein provided in FIG. 2; and
(c) a nucleic acid molecule that is the complement of a nucleic acid molecule of (a)-(b).

5. An isolated nucleic acid molecule comprising a nucleotide sequence selected from the group consisting of:
(a) a nucleotide sequence that encodes the amino acid sequence of a variant estrogen receptor protein provided in FIG. 2;
(b) a nucleotide sequence that encodes a fragment of the amino acid sequence of a variant estrogen receptor protein provided in FIG. 2; and
(c) a nucleic acid molecule that is the complement of a nucleic acid molecule of (a)-(b).

6. A nucleic acid vector comprising the nucleic acid sequences of claim 4.

7. A nucleic acid vector comprising the nucleic acid sequences of claim 5.

8. A host cell containing the vector of claim 6.

9. A host cell containing the vector of claim 7.

10. A method for producing any of the peptides of claim 1 comprising introducing a nucleotide sequence encoding any of the peptide sequences in (a)-(b) into a host cell, and culturing the host cell under conditions in which the proteins are expressed from the nucleic acid.

11. A method for producing any of the peptides of claim 2 comprising introducing a nucleotide sequence encoding any of the peptide sequences in (a)-(b) into a host cell, and culturing the host cell under conditions in which the proteins are expressed from the nucleic acid.

12. A method for detecting the presence of any of the peptides of claim 1 in a sample, said method comprising contacting said sample with an agent that specifically allows detection of the presence of the peptide in the sample and then detecting the presence of the peptide.

13. A kit comprising reagents used for the method of claim 12, wherein the reagents comprise an agent that specifically binds to said peptide.

14. A method for detecting the presence of a nucleic acid sequence of claim 4 in a sample, the method comprising contacting the sample with an oligonucleotide that hybridizes to the nucleic acid sequences under stringent conditions and determining whether the oligonucleotide binds to the nucleic acid sequence in the sample.

15. A kit comprising reagents used for the method of claim 14, wherein the reagents comprise a compound that hybridizes under stringent conditions to any of the nucleic acid molecules.

16. A method for identifying an agent that binds to any of the peptides of claim 1, said method comprising contacting the peptide with an agent and assaying the contacted mixture to determine whether a complex is formed with the agent bound to the peptide.

17. A method of identifying an individual having or at risk of developing a disorder mediated by a variant estrogen receptor comprising the step of analyzing nucleic acid molecules isolated from said individual for alterations in the estrogen receptor gene sequence, wherein an alteration in said estrogen receptor gene selected from the group consisting of the variants provided in FIG. 2 and FIG. 4 identifies an individual as having or at risk of developing said bone disorder.

The application's sequence listing, which the Patent Office published only in electronic form, follows.

SEQUENCE LISTING (2 sequences)

SEQ ID NO: 1 - DNA, 465237 bp, human
ctgttgcttcacctcagaatcttgggagaagcaggctcaacaatgagggaatcatccatgacacccactgtcccaatgaccatctttgcctccacctgtttgtgccctttcacaatcatcaagatattgtgatcttgatttcgattcttttggatacatatcctgaagtgggaaggctgggttacatggtaataagagatatcagcacttccatgtttatagcagcactattcacagtggccaagatatgaaatacggtatatgcatacaatggagtattatgcagccatgaaaaagaaggatattctgcttcttctatcatatggcatgacattgatggacctttaggacattatcctaaatgaaataagccggtcaaagaaagacaaatactgcatgattccacttatataagatatctgaaatagtcacattcatagaatcaaagagagaaatggtggttttcaggggctggaggcaaagggaaacaggggagttactaagaaatgggcataatgttccagttaaacaagttgaataagctcagagatttgatatacaacattctacctagaggtgacaatgtacggtgcacttaaaaatttgttaagggggtagatctcatgttaaatgttcttaccacattaagagaaaacaaacaaacaaaagatactgtagtgttggagaattctcacaatggctgaactggtctccactgagcctggtggcaaaagcagacgggggaggctcctctctcagatcagttttgtagagttgagggaggggcaccttgaatgaacataatacttggagagagtgttgcagttagaggacagaaaacaaaagcacatcatcaagagtgcctcctgctatgtttatgcctattttactgtccttttcaaagaaaagctttaagtttaattgatcaacaatttttgaatttttcttttagttgtgttttcaaatttattgatttctgcatttctatttatttgttcctttgttatgcttttttggggggggaggcttattttgttgttctttaatttcttgagttgaaagtttatcccatttatttttagtctttttggtttttaatgaatatatttaagcctctgaattttttctctgaatactgctttagtggtattgcactagtttttttttaaccccttgttcttggtttattaacagccttttcagcataattcaatgcttataacactgtctacatattgtttttaaaatggttttgaagattagtttttttaaaactaatttctttcttttatttatttatttttgagacagggtcttgctgcattgcctaggctggagtccagtggcgtgatcatggctcactgcagctttgactccctggcctcaggtgattctcccatctcagcctccagagtagctgggactacagaaatgtgccactacacctggctaatttttatatttttgtattttttttgttgttgttgttgtagagatgaggtttcaccatgttgcccaggctgatctcgaactcctgtgtttaagccatccacataccttggcctcccaaagtgctggtattacaggtgtcagctaccatacctggctaaaaactaatttaaaacaacgtcattatggaaatacaatttacactgcttacagctcactaattaaaagtgtgcattttcatgttcttaaaagtatattcaaaaagtttgtgaccatcaacacaatttcattttagaatgcttttgtcttttctaaaagaaacccatccttttcctcccacaactttccctacctttaagccaccagtaatctactttttgtctttatgtatttgcctattctagaaatttcatataaatggaatcatataatatgtcgccttttgtgactggctgctttcacttagcataacttttttgaagttcatccatattgtagtgcttcagtccttgttatgggggaataatattccattgtatggatatactacatttaaaaaatctatttgttattggtaaacattagagctgtttctactttttggttattatgagtaatgctgctaaaaacattgtatacaagttcttgtgtgaatgtgtgcttttatttgtcttgttgatatacctaggagtggaattgttaggtcacatagtaatgctatgtttaccttttgagacattgcaaaacttttttccaaagcagctgcaccattataaattcccaccagcaatgcatgaggattcaatttctccacattgttgtcaacacttgttactgtctggagccagcctagtgggtgtgaagtggtatttcattgtggttctgatttgcatgtctctaataactaataatgttgagcgtattttcatgtgctcactggccatttgtacatcttctttggaaatatatctattcaccccttttgcccattttaaatgttgtattatttttctttttattattgcattgtaagagctctttagatcttctagatgcaaatcttttatcagatatatgatttgcaaatattttctactgttctgtgtgttgtctttcatttttaaataatattctgtgaagccaaaagttttaattttgatgaagtctaaattatcattattctttgttttgttgtttgtacttttggtgtcatagctaagaaataattgcctaatccaatgtcatgaagatttatgtctttctttctttttctttccttctttctctttttctttctttctctttctttctttctttctctttccccttccttccttccttccttccttccttccttccttccttccttccttccttccttcctatctcgcgctctctttctttctctctctgtctctctcttttttttaggcaaggtcttattatgttgcccaggtgggtcataaactcctgggttcaaaagtgatactttcatctcagcctcctgagtagctgggactacaggcatatgacactgtgcctggattaagagttttataattttagcttttgcccttaagtctttgatctgttttgagttaaaatttgtatagcgtgaggtaggtgtccaacttctttcttttgcatgtggctatctagttgctccagcaccatttgttgaaaaggctctctttctcccttgaattttcttgttgcccttgtcgatgtcagttgactataaattcctgagtttatttctgaattctcaattccactccactgatctaagtttattcttattctagtagtcaccattattttgatcttctttctgtgtctcagattttttccccctgtagaacatctccagtaatggtttatataagtttgtgattagtgatgttatagtgtgataatgtgtttatttgctcttacactttggctgagcttagaaatatttgtattttgacctttgatacggtttggatatttgtctcctccaaatctcatgttgaaatgtaatcactaatgttggaggttgggcctaatgcaaggtatttgggtcatgggggtggatccctcatggcttggtgctgtccttgggatagtgaatgagttctcatgagatctggttgtttaaaagtgagcggtacctccttcctctctctcttgctcctgctctgccaagtgatgtgcctgcttccgctttaccttccaccatgagtaaaagcttcctgaggcctcaccagaagcttagcagatgcaggtgccatgattcctgtatagcctgcagaactgtaagccaattaaacctctcttcttgataaattacccagcctcatatatgttttatagcaatggaagaatggccgaatacaacctttgagatgtctgtttcactgtcatctttgcttcagagttactgaagaaaagtctgatgatctcattctgttttcttagttgataattggtttttattttatctctttctctgcaagactttcagattttctctttatatttagcgttctgaaatttttacagtactgttttgcgtgattcattttttattcatcttttgtcttttcaatctgaggatttttgtttgttctggagtatttctttattattgctttgagtactgcctttcttccattctattctttccttcaggcactcatattttcaaatattagaatttttggatctggtctaaaaaggaaataaaaaaatctataatcagactagaatagaaggggtacccttgacagtccaagaaataagagaaagccctgacatgccaaacagatgttacgagataaacttgtaagacagaaatactgcagctggggcgcagtggctcatgcctgtaatcctagcactttgggaggccaaggtgggtggatcacttgaggtcaggtgttcaagaccagcctggccaacatgatgaaaccctgtctctactaaaaatacaaaaatttgcctggcctggtggcgggcgcctgtaatcccagctactcgggaggctgaggcaggagaattgcttgaacctgggaggcagaggttgccatgagctgagatagtgccactgcactccagcctgggtgacagtgagagactccatttcaaaaagataaaaaatgacacaagaaagatgatagaaatgacaggatgtggagacacaactcaaattctaggttccagatcttgacatcttcccactgtcttactgctctgcatcatgttagcttagaaagttactcaacctctttgatctttggattcatgatctaaaaatggagtgttggggggcgtggttaaagtgataattttgaataagtcttcaaacccaacatgtcatgagccttccttgaattgcatcttcatttatagattaaacgttttgataaattcactatgggctcttaactgtattattaaaattgtggtgacaaccagctgttattttatggtagaacataagtatctcttttcattgccattcttcactaaaaggatactttgtccccctttttctttttccataggttattggggtacaggtggtgtttggttatatgagtaagttctttagtggtgatttgtgagattttggtccacccatcacctgagcagtatacactgcaccctatttgcagtattttattccttgccccctccaacccttccctccaaatccccaaactcctttgtatcattttatgcctttgcatcctcatagcttagctcccatataacagtaggaacatatgatgtttgtttttccattcctgagttacttcacttagaataatagtctccaatctcatccaggtcactgcgaatgccgttaattctcttctttttatagctgagtagtaatccctagtatatatatactacagaatctttatccactcattgattgatgggcatttgggttggttccacgattttgcaattgtgaattgtgccactataaacatgcgtgtgcaagtatcttttttgtataatgacttattttcctctgagtagatacccagtagtgggattgctggatcaaatggtagttctacttttggttctttaaggaatctccacgctcttttccatagcggttgtactagtttacattcccatcagcaatgtagaagtgttccctgatcaccacatccacgtcaacatctactgttttttgattttttgattatggccgtttttacaggagtaaggtggtatggcattgcggttttgatttgcattgccctgatcattagtgatgttgagcatttttttttgaatgtttcttggccatttgtatatcttcttttgagaattgtctattcatgtccttagcccactttctgaagggattttttaaaattgctgatttgtttgagttaattgtagattttggatattagtcttttgtcagatgtatagattgtgaggattttctcccattctgtgggttgtctgtttactctgctgactgttctttttgcggtgcaaaagctctttagtttaattaggtcccggctatttatctttgtttttattgaatttgcttttgggttcttggtcatgaaatccttgcctaagccaatgtctagaagggtttttccagtgttatcctctagaatttttagagtttcaggtctgaaagtccttaatccatctagagttgatttttgtataaggtgagaaatgagaatccagtttcattctcctacattcggctagccaattatcccagcaccatttgttcaaaagggtgttctttccccactttatgttttcatttgctttgttgaagatcagttgactgtaagtatttgggtttatttctgggttatctattctgttccattggtctatgtgcctatttttataccagtaccatgctgttttggtgactgtggccttataatacagtttgaaatctggtagtgtgatgcctccagatttgttctttttgcttagtcttgctttggctatgcaggctttttttgggttccgtatgagttttagaattgtgtcttcaagttctgtgaagaatggtggtattttaatggggattgcattgaatttgtagattgcttttggcagtcattttcacaatattgaatctacccatgcatgagcatgggatgtgtttccatttgtgtcgtctatgatttctttcagcagtgttttgtagttttccttgtacagattctttcacctccttggttaggtatattcctaagcattttatttcatcttttgcagctatcataaaagaggttgagttcttgatttgattctcagcttggtcactgttggtgtatagaagagctactgatttgtgtacattaatcttgtatccgaaactttgctgaattcttttatcagttctaggagctttctggaggagtctttagggtttttgaggtaaacaatcatattgtcagcaaacagcgacaatttcacttcctcttcgtcaatttggatgccctttatttctttctcttgtctgtttgctctagctaggatttccactactatgttgaagaggagtggtgagaatggccatccttgtcttgtttcagttctcagagggaatcctttcaacttttccccattcagtattatgttgcctgtgggtttgtcatatatggcttttattatattgaggtatgtcccttgaatgatgattttgctgagagtttttatcataaagggatactggattttgtcaaatgctttttctgcatctgttgagatgatcatatgatttttgtttttaattctgtttatgtggtgtatcacatttattgactcgtgtatgttaaaccatccctgcatccctggtatgaaacccacttgatcatggtgaattatctttttgatatgttgttggattcagttagctagtattttgttaaggattttagcatctatgttcgtcagggatattggtctgtagttttctggttatgtcctttcctggttttggtattaaagtaatgctgacttcatagaatgaattagggatggctctttctttctctattttgtggaatagtgtcaataggattgctaccaattcttctttgaatgtctggtagaattctgctgtgaatctgtctggtcctggacttgtttctgttggtaatttttaaattaccatttcaatctcactgcttgttattggtctgttcggggtatctaattcttcttgatttaagctaggaggtttgtatctttccaggaatttatccatctcttctaagttttctactttatgtgcataaaggtgttcatagtaggcttgaatgatcttttgtatttctgcagtgtcagttgtaatatctcccatttcatttcttattgaggttatttggattttttctcttcttttgttggttaatcttgctaatcgtctatcagctttatttatcttttcaaggagccagctttttgtttcacttatcttttgtatttttttgttgttgtttcaatttcatttagttctgctctgatcttggttatttcctttcttctgctggggttgggttgggtttgttcttgtttctctagttccttgagatgtgaccttagaatgtcagtttgtgttctttcagtctttttgatgtggatgtttagggatatgaactttcctcttagcaccgcctttgctgtatcccagaggttttgataggttgtgtcactattgtcgttccgttcaaataattttttgatttccatccgatttcgtttttgacccaatgatcattcaggagtaggttatttaatatccatgtctttgcatggtttcaaatgttccttttggagtctatttccagttttactccactctggtctgacagagtgcttgatataatttcagttttcttatatttatggaggcttgtttatgacatatcatatggtctatcttggagaaagttccatgcactgttgaatagaatatgtattttgtggttgttggatggaatgttctgtgtatatctgttaagttcatttgttccaaggtatagtttaaatccattgcttctttgttgactttccatcttgatgatctgtctagtgctctcagtggagtatcgaagtcccccagtattattgtgttgctatctatctcatttcttaggtctattagtagttgttttataaatttgggagctccagtgttagatgcatatatattttcctgatggacaaggtcttttaccattatatactatccctctttgtcttttttaactgctgttgctttaaagtttgttttgtctgatataaaaatagctacccctactcacttttggtgtccatttgcatgaaatgtctttttccaccccttactttaagtttatgtgagtccttatgtgttaggtgagtctcttgaaggcaacagatagttggttggtgaattcttatccattctgcagttctgtatcttttaagtggagcattgaggccatttacattcaatgttagtattgaaatgtgaggtaccattgcattcatcatgctctttgttgactgtgtaccttggttttttgtttttaaattgcatttttattttataggtcctgtgttatgctttaaagaggtttctgttttgatgtgtttccaggaattgtttcaagatttagggctccttttagcagttcttgtagtggtggcttggtagtggcaaattctctcatcatttgtttgtctgagaaagactgtatctttccttcatatgtgatgcttagtttcactggatacaaaattcttggctgataattgttttgtttgaggaagctaaagatagggccccaatcccttctagtttgtagggtttctgctgagagatatatctgctgttaatctgataggttttcctgtatagattacctggtgcttttgtctcacagctcttaagattatttcctttgtcttaactttagataacctgatgacaatgtgcctaggtgatggtctttttgcaatgaatttcccagttgttctttgtgcttcttgtatttgcatgtctaggtctgtagcaaggctggggaagttttcctctattattcccccaaatatgttttccaaacttttagaattctcttcttcctcaggaacatcaattattcttaggtttggtcattcaacataatctcagacttcttggaggctttgttaatattttcttattctgtttcctttgtctttgttggattgggttaatttgaagaccttgtctttgaactctgaatttctttcttctactgttcaattctattgctgagactttccagagcattttacatttctataagtgtgtccagtgtttcctgcagttttgattgttttttctttatgctatctatttccttgattatttctcccttcgcttcttctattgttttttggatttccttgcactggggtttggctttctctggtgcctctgattagctgaataactagccttctgaactcttttttcaggtaaatcagggatttcttctcagtttagatccattgctggtgagctagtatgatttttttgggggtgttaaagagccttgttttgtcatattatcagatttggttttctggttccttctcatttgggtagcctctgtcagagggaagttctatggctgaaggctgttgttcgtattcttttatcccacgaggtgttcccttgatgtagtactctctcccttttcctatggatgtggcttcttgagagccgaactgtagtaatggttatctctcttccaggtctagccactcagcaagtctaccaggctgtgagctggtattgcgggttgttggcactgagttctgtggtgtgaactgtctgtgtgtctctccgccatggacacctgcacctgttatgggggaggtggtagaggggtgaaacggatccctggttcttagctttggtggtttaatgctctatttttgtgctggttggccttctgccgggaggtggcgctttgcagacagcatcagctatggtagtgtggagagggactggcagtgggcggggtcctagagctcccaagaatatatgccctttgtcttcagctactagggagggtagggaaggaccatcaggtgggggcagggctaggcctgatctgagctcagaccctccttggataggtcttgctgtggctgctgtgaggggatgggagtgaggttcccaggtcaatggaattgtgtacctaggaggattacggctccctctgcggagtcatgcaggttgtcagggaagtgggagaaagccaacagtcaccagcctcacccagctcctgcgcaatccaaaggggtggtctcacgcccactgtgtccccgctaacaactctgagtctgtttccaggcagggggtaagcagggctgagaacttgccgcagtctgcccacctcccagtggcaaaagaaaagggctttagttcttccccagcctgtggagtctgcacgcaggattcgcaccctcccccgtgttatggccaggaggcttcttgaccggttcaaattgttacaaagttcagctggagacttccttcttcctgtggtgtttcccccgtgcctctggccaccctcctgaaggatccttgtgatgccaggcaggagtggcctgcttggggacccagcgagctccccaggcctttccagctgcttcctctatccctgtgttttgcttgtctatctaaattgactcagctccagataaggtcagaatcttctcctgcaaactagaacttcagtttccccataggaggtgtgcgttccagggcggaggatctccctttcccacttccgcagttggggcactcacataatttggggtgtctcctgggtccagcaggagcagtccgcttccttcagagggtctgtgggtcctcctgggattcctggtttattcctgcagttgttctggagctgaaattcacaatgtgagcctctgcacgctgttctgtgcgtccgagtcgaagctgccatctagttttgcctcccatccgtggtgatgatctatgatctctacaaggatacatttgctagaaatatttgttctctctggccgggcgcggtggctcacgcttgtaatcccagcattttgggaggccgaggcaggtggatcacgaggtcaggagatcgagaccatcttggctaacacggtgaaaccccgtctctactaaaaaatataaaaaattagctgggcgtggtggcgggcgcctgtagtcccagctactcaggaggctgaggcaggagaatggcgtgaacccgggaggcggagtttgcagtgagccgagatcgcgccactgcactccagcctgcgcaacagagcgagactctgtctcaaaaaaaaaaaaaaaaaaaaaaagaaatatttgttctccctaccctaaaagggatataattgaaatacaaaaaaacaatatggagaggtaatttctttctttctttttctttttcttttttttttctttttggagacagggtcttgttctgttgcccaggctgaatgcagtgggacaatcacagctcactgcagccttgacctcctgggctcaaatgatcctcccaccttagcttcctgagtagctgggactacagatacgcaccaccacaccagctaaggtttaaaattgtttttaatagtgagagaatttcacaattttgccaggctggtctcgaactcctgggctcaagcaatctgcccacctcggcctcccaaagtgctgggattataggcatgaaccactgcaccggaaccttggagaggtaatttttaacaaggccatcttttctctaacagaggagcactaagaagtcagatttcatcctggcatgtgactgtcacacaagcaaatgactgtgctgattagaaagcttgtgtagctcagaaatatcacataatatgcagtctccgttgagcaacattgcagcttatgttcattaggtaaaaccatagtaatctgaaaatattttaggtatatctgccattattttatgactaaacaaggagatgattttagtattgattactttcatgcacatattttaaaaactcctgattttttatgttggaaacattccagttctttttttttttttttttttttttttgagaccggagtctcgctctgtcgcccaggctggagtgcagtggcgggatctcggctcactgcaagctccgcctcccgggttcacgccattctcctgcctcagcctccccagttcttttcttatctagctattttgaactatacatttgattgtattccaaaaatacgtacaactattatgtatcaataaaatgtcctaacttttttgcatagtgaaaggtttgttcaggttatagtatgagttgcagtcatcctgtttttggcatgggagggagatgtttctaaactagccagttataggtgtcacctaccaatgttctacaaaatgtggaccaggcagagagaattacagatgctgggtggaaactttggttctgggcctgattctgcccctaacttggcgtgaagcctcagtttcttcttactacagcaggaaaaataatacttgctttatctgtttcatgtgtctgctatgatgataacaaatataatgtatatgagacaatttaaaaacttaaagcattttaagttccttggtctttatgggagagggaggaccatcatttctttctcttttttctttttcttcttctcctcccctttcctcctctttttttcattccttctttttctccttatctttctcctcctccctctcctccttcttcttcctcctccaacctcctccttctcctcgcttcttcccttctacttttacttccttcttttctccttctcctccattctctttctcctcctccttcatccactccttcttcttcttccttttgagatggaatcttgctctgtcacccaggctggagtgcagtggcatgatcttggctcactgcagcctccacctcccagattcaagtgattctcgtgcctcagcctccctagtagctgggattacaggtgtatgccaccacacccagctaatttttttttttttttttttttttttgagacactatttcactcttgtcacccagactggagtgcagtggtgtgatcttggctcactgcaaactccacctcccagattcaagcaattcccctgcctcagcctcctgagtagctgggattacaggtgtgcaccaccatgtctggctaattttgtatttttagtagagatggggtttccccatgttggccaggctggtcttgaactcctgacctcaagtgatccacctgcctcggcctcccaaagtactgggattacaggtgtgagtcaccgcacccggtcctttccttcttcttcctcttcttcttcttcttccttcttttctctgtctccttctcctttttttcctccttgtccttcttctgtctgatgcatagtcaagggtttgataagtgtctgctctgtgctgacagtttcaggagcagtacagaaactcctattttgtactccaaataatccacaagaattaattggatcacctcgaaggaggaaagagaagctcaaagagatcaggtaagttgcacaagctctgaatcccagcacaccgtgaaaacgggcttcaaatctggtctttctgattccaaagtctatagtcttacctgtgattcactttcctgatttgttaaaaaaaaaaaaaaaaaaaaaaggatgcttcatttgcttaagtaaaattccagggaattttcagcagaagttttaaatgttggtagagaattttcttgaggcaaaactgataatcataaagcttgtctggctaccaaaattgatctggtagtcaaaacttcttggtaaagttatcagtatagagacccaagagaaacaaataagaagaatctgctactaaattttggcggagttgagaaattttttaatttgagctttcactctaagagataagagtctgtgaccaattgtattgtgtgttttgcattgctatgaaggaatgcctgaggctgggtagtttataaagaaaagaggtgtatttggctcagagttctgcagcctatacaagcagggcagcagcttctgcttggcttctggggaggcttcaggaagcttttgctcatggcagaaggcaaagagggagcaggcatgtcacatgagagggagcaagagtgggggaggaggtgccaggctcctttaagcaaccagctcttgcatgaactaatagagtgagaactgaatcattaccatgaggaggacaccaactcattcatgagagatccgcccccatgacccaaacacctcccaccaggccccacctccaacactggggatgacatgtcaacacaagatttggacgggacaaatattccaactattcacccatgttccctaacttgaagggagttcacattaggacaagttcactgaaatctttgttttggaatggggatggataagacatcatttattaagttatggtttttagtttctggctttggctaactcaaacaaaaagggaatatttcagactggtgcttggtaaatcatagaatgacaaacaattggaagaccaggttaaaatgaacttggaggacattaagtgaattaagccaggcacagaaagacaaatactgcaaattctcacttatatgtggaatctaaaaaaagttgagcttatacaaacagagagtagaatggtggtcaccagaggctggggaaggaggagttgaggagatatcggtcaaagcatacaaaatttcagttaggcaggaggaataaattcaagagatctattgtacaacatggtgactgtagttaataacattgtgactgtattgaattcttgaaagttgctaagagagtagattttaagtgttctcacttaaaaaaataagtatgtgagataatgcgtatgttagttagctctatttagccatttcacaatgtgtatgtagtccaaaatcatgttgtacatgattcataaatacatttttatttgtcaattaaaaataccctggaatttgggcaacaaaagctatctgcccaggtgggaacaaatcgcctctgagcatctttccttcattgcatctctaatcaagatagaaagtccctggagagagggtctgattggacaagcttgagtccgatccctatactttggctatgagaggaatattcttgctgaagtcgtctgtgatagaccctgtggatgcatttggcttggaaatacgaaagcgccttgatttagaatcccctcaagtctgtctgttcacagtgggataatttttattctcttcctctccagaaggaatcaaggggtgtcataaaggaggtatgtctgctaagcagaactacctcccctccccaaagaaagtctgttaccatgtatacttttaaacattttattttaaaataaaattagactcacaagaagttacaaaaacagtacagaattgccatgtaacttttacccagctccccacaatgataccatcttatataactctagtacattattaaaatatggacattgacaccggtaaaatactattaacagaaccacatactttattctgcttttgctttttattttattttattattttattattttttgagacagaatctcgctctgtcacccaagctggagtgcagtggtgccattgcaacctctacctcctgggttcaagcaattctcctatctcagcctcccatgtagctgggattataggtgcccaccaccatgcctggctgatttctgtatttttagtagagatggggtgtcaccatgttggccaggctggtctcgaacgcctgacctcaagtgatctgcccgcctctgcctcccaaagtgctaggattacaggtgtgagacaccacgcccagcctgtttggcatttttttaatacgtgctctataatattgatttttgtgtaaacatgtgtttgtatatatctataacgagaactcaagtcatactgtaatcctattttgtaaactgacttttttcctttatcagtatatcaagattattttcccacatcatttgacattttttctacagtgtaatttaatggctacattgttttctatcctatgaatatatcaaacctatttcttaaaaaccctactcagggattttaaaaaataaaaacgatgttttaatattataaagattcagtgaggtatattcttatacgtacacatttctaaggtttgagttcttacaagatgctgaactagctaagactactggttctcatctgtcacatagggaaaaattatagaaggaaaacatcaagatttggaaaaatctgtgagaattgttttgcattagtgtgtaggtgtgtgtgttggggtggtggctgcagcttggggcagaggcctcaggtgtggctgtggagtgatcagatagagtttttggagttcggcttttgccccaggacacttggtgcctgcccccagagctgcagcccagaaggccgttctcagaggtgaagtccaggcagtgaggagctgtctgccagtaggcagttgaagaaaaaaaatgagctagaggaaaaaaacaaaaaaacaaaatctccttctaatgctgccaggctgccgggagctggaaatgaagcactgacaggagtgggtatttcatggtgaagggaataatcaactggtttttttggtacccaagactttccaccttcacacacacacatgagatgctttgaaataaagatagtcacttgacttagtaaagtttgttgacataaaaatatgagaaataccaaagaatacaaaaaggaaaacttcgttaatattattcagacttaaaattccagattgtatcaacattaagggggttgatgaaaacatgggagaaagccaagggacgtgagatcgggctcaattcttgacttgctgggggaaggtatcaacacagaacttttaagaattagaaggcattaaaaagaaatagaaatcctgaatcaaattgaaacagtaaaataaaatagtccaaagatgtgtaaatatatcactatcacaataactataaataggttaaatttgccagttgaaagaaaggaactattaaatgagattttaaaaatttggatatatgcttttcatgtgaacatacctaaagcatatacacaaaaccagaaaataaaaagatggaaatatccacagagtgacaaaggaaagctggtgcatttgtattagtatcagataaagctcacatttagataaaaaacattatagtaatagagaaagtcacaaggttaaagtttcaattcaccaagaaatatccattctaaacatgtatacatacccaattaagctgcctcaaaatatatatgacaaaaattgggagaactataaagtcagatataaggattgaaaagaaagaaatgaaactaattattttcagatgatatacacgtttacatgaaaaaactccaaagaatcttcaggcaaattattagaaattgtaggagagctccgcaagagggctggatataaaattaatatacaaaagtcaatgtcatttcactataccagaaaaaagacaataacattagaaaataaatctaacataagatgtagaaaaacttcttagaggaaaaattttcttgggaaatattaaagaagatctaaataagtagaattacataatattcatgcataagaaggcaacattttgaagacgtcttgttatacataggcctaggaataatatagttttaagctatattattttgaactgtagatgaagaaaagctctttttttccttgagtattttaagattttgaataaagtcatattgctctaggaatattttatacttctgccagcagtgtttgagaatgcctacttcctacattatcaccaccataaatgtttaaaacctgatagcacacagtttaaaaaatttgtaattctccaattaacagtgacctttaaaaattatgtttactgatctctattattttgtcctttgtaaatcttttattagtttttatgttcacatgttccgttttaaaatagacttttaagagctctttgtattaagaatattaaggctttgtccatataattagtatttttcagaataccctttctaggtacagtttttcagttccagtgcacagaatggaaacttgctacctgctacaccacattttcactagtatgtgatgtattcatcacaaacaacagtattggccaacattttccctcactgtgaagtgcacatttgacatcctttagaaaaattactgacggttttgagacgattgttctgtgctttctttcagtcagcataattttcccgaaagcagagatgactcttccagacttgctaccaatgcttgaacaaactgtgtaagcttagtccaaaaaaaatatttgattaatagattttattttggtagattctaaggttccaagcagtcagagaaataatcgcagagcctcaaatatctccaaaatctgataccaatccttttgattgtgaattatattctgtagctaccaaagaaggtaagtttttattttttctactctattaactttcccttggacaactgaatattaagatgactatgtaaggaggttatcagaccaaggcctcacacatcaggataaaagcacatgccatagaaagaacatttgtgtctcaaaaggtgataccaagacaaggctgtgggatatatatgggcacaatggttgataccttcaaagacttcatacatggtgtggaggtttttggagattttaatttataatgacaatctttccagttaggagaatttttggactgtaaagttagccaaacaacttttcaatgataataaatgtctatatcttacacagggggaatacagtttttgtttgttttagttttttctctgtctattcatataggggcatcatatgtctttatcattaaaaactgatttagataggcagttgtagagaaatttaatgtgtgggaatttaaagttttaaaaagatgtagcaaaatatagatacatttaagacccactgcaccaatgaaaaagggaaattaattaaactagacaacttttatgggtactaaccattaaaattaaaattttagtcattgtaaattacattacattataatagttttcaatctattgttaagttaaatattttgggtaacaattgtatttcacagttgttcacactttgcataattttctaaggaaaatgagtcccttagggagaaaattgttcttaaattttattgttggataatgttgctgtactaacatggtttactgaagtggatctaccatgggtgtttaggtttttgttctttacaaaatgtattgggtgaaattttccatatcactggtgaacttttcatgctaattttccagtcccttagtttaaatattatgcattttttcctgcaaatctatcttgaatctgaaaaggccccagaaggaattagcgtgagtccagagtagatggactgcaaatgttacacatatttcaatatgtatccagctttcaaaaatagcttattgaaatcaaggttgaaccacatgaaattttgggtttttttggatgtaaaaaatggttatatattggcattttcatatcatccaatctaatatcttcctctagtgaggttctggcaaaaaaaaagtatgatgaccagagttgttcactcttttaagctttatgtttcaaaatatttttaaaatttaaaaccatctaagtgcatcccaaaaaacattggaaaattttgtaggctagttttgtttaatgatttttcttctatagatttatttttatgctatgccttactctccaattagattttagccatccaagaaaggtaccttgtacttctaagcgattctcccatcacctggacgttaactgcagcccacactgcagtgtcttgactgcagtaggcactcagtaaatatttattgatggtcctgattatgggatgatgaaatatgctaaaggtaacttaaacttttgtcaataaaaccgagtttcaggttagtttgaccttttccgtatctctaaatattttctttcatgtcatttttgtgaaatagctcacgaaagtacttattgattctgaaatccttttcccctctggtattcctgagctatcctcactcacacacagcacaccagtgctattgtttgctgttttgttaaaatcattctcattaatattcctcattcaataaaaatagttgattcccacttatgcaccaaactctattctaaagactgctgtttattttatggagtcaatatcatcattttgttttccattccacataatagttggatgccaatatgaagtgtatatttataaataatatgtgctttttttatttgtttatttttattttactttaagttctgggattaatatgtgcttttaacattattgtttaaaaataacaggagatatcatatcttaagcaccttctatattctgggcactgttctaaatgtatcaaagttatcatctcatttaatccctccacacacctgagggaagagagtattattccttatttacagataaggaagctgaggcttggaagattcatatatctaagatcacaaagctagtaaagcagccaagtttgagtctaaatccaggttttaaatatcatattgcatgtgggcatagatgagcaagaacaggttttcctgaagatggccagtctaaggcttagaagaaggaagctcggggagcctaaaccaagatatgctaaggcaagtttttttgctcgtttgtttttgagatggagtttcgatcttgttgcccaggctggagtgcagtagtgtgatctcggctcaccgcaacctccgcctcctgggttcaagtgattctcctgcctcagcctcctgagtagctgggattacagtcatgtgccaccatgcccagctaattttgtatttttagtagagatggtgtttcactatgttagccaggctggtgtcaaactcctgacctcaggtgatccgcccacctcagcctcccagagtgctgggattacaggcgtgagccactgtgcccggcctgctaaggcaagtattgaccattagaggagatgactagtcccagtggcaggcctttcctactgggagtcagccaagagctccccactcttctggttccattgttcctcctgcaaagttccattcataaagtggtttcccatttgattgtccaatgatgcaaatctccagtcctttttagcactgagtttctcatagccttttaccattgagtttctcatggctaatgaatgctaatgaattggcattccgatttatctataggattccatgagtcagcctcatgaaagaaggttccactccctcactgtgggtaccgtctgggaattagacccttaataggagtaattcagcaggcaatgtcttctctaataacactccagtctcactgagagcttctattcaaaacaacaatctaaaggtctacagtgtgactttcaactaaactgaaaaaagaatagaaaatgaatgtatgtgatgtacacattcattcaaatgtttatccctaaaattcatagcagattatgactgatcattaaagccaaattaagggggcaaaatgtataaaaacaaaaggaactcttaggcataatagtctttaaagtaaaacattactactgacagttgcttgtgtgaaagatatctttatttaatatggtaaaaagaacacaggaattgctagcacttaccgtatgtccattttatgtccaccttaaaatagatatgtctgtatagtcatcagattagcactttagaattcaataatttcaaagaaatcagaatggacattcattacatgtgcttatctggcaggagaattgaacaaatcctttctataggaaaatgtaaaattcctaataactccacaggattgtaagacttgggctggtaacttcagtgaatacagcagagtttgggcgatgggaaaaggtacagttgtgttcctaaactcttaactttgtgaggcagtgactttatttcttcttcatgattttgcagtaagttcagtacagtggttagtttcagtatagttcagtggctaagcttttgagagggacagttctatgttctaactcaacttctgccacttgttagaaagtgactcttgtcaaactattggccctttcaaacctcagtttcttcatctgcaaaactttattcatggggttgttgtgagggttaaatgaaaaatatgtaaaactcatcaaaattttaagcacaaaataccaagtctcagcagaacacatacagtaggagtccagccattaaaatttgaaacaggcagaggcaaaaatattttgtttagaagtacttgcattttctagctctttggctgagtggacaacattttggtgttctttttcttattgttattttttaaagcatacgtatatgttatgtagactcttttgtatgtatatttaactcacaataaatatttataaatagaaagaaagatatcacatatatgtgcacatacactggtaagccccaatacactgcctcatttctaaatgactctagcatttgtaggacagtgcttttaaacctttcgcactcacgagatactctggggagctttaaaatatatgctgatgcttgggctccacttccacatattctgatttaattgattaggggttcggctcaggcatcagtatttgtaaataaaagcttcccagctgattctaatgtgaagttaaaattgacggatactgataccgataaaagagtgagtgcaatagacacaaaacaaaataggagatgtgtctcaacaatggtaagattgttttaaaaattatagtacaattaaaaaaataatgtaatgcaattatttagaaaattcttacaattttgtattttgaaagcaccatgtggatatcatggggaaaaccagaactttgttggatttccttaacaaagattttgcagcttggtatcatttccattttgtagtattttgatatccaggagatgaaagtgggaagtggacaattgcctataaggccatgctttgcaccagggtgtccagatgagaggcaagtggagggtaaagtttagcctgcattctgttccctaaggtacatctcctggtgaggggtggcttctaatcaggggaagaagtcctatgtcttgtttcctaatgcacgcacaggttccacaagccctcactttgttctcaagagcatagcatttattttggtgcttaagactgctgaatgtcacaaaataatttttcccagcacaaacaaatattcaaaatagttatgtgcacagcctgtttgagcaccaataagttttggctctgtggcctgtttgggcactgacatggtttggctctgtgtccctacccaaatcttatcttgaattgtgatccccacatgtccagggagcgacctgatgggaagtgattggatcatgggtgcagtttctcccatgctgttctcatgacagagagtaagttctcaggagagctgatggtttaaaagtctttggcagtttccctttctctccctctctctcctgctgctatgtaagacgtgccttgtttcccctttgccttccgccatgattgttttaagtttcctgaggccttcccagccatgtggaaatatgagtcaattaaacctcttttctttataaattaccaagtctcaggcacctaaaccaattagaaggtgtgccattggcacacagcagggtcctggtgtctcccccaccatccagccaccactctgccaggtgtgaatgtattaactattgctggagtgaggtgaaaggaggcagtcctgcagaagggccactgccactgggatggcacaggagggcgctcgagagactcaccttagtgactctatcaactggtgaaaatatttagatattttcacaatcaatatggccttgcttgtatatacagggtgattataaactctcttgccacttatcacagaagtcgaagtttcatcatttcttttcctgtatttggtttatgtgcaacaatataggtttattttccagttctggaaaataatcatggttaatactgactgagaactgatcatttcctttcctctttataccaaccaatggggcaggtaccattattaaagggggaggaaatagaggttaaataacatgcccccaatcagtagtggggaaatgaaagaatcaggattcaaagccaggtttgtctgggtcttgggaccagctcagcgtctgtgctgtactgcccgggactcctgctgccaattctttctacctcattatccctcaaccctgcaccagcaaatccacagggcgtgagatgaagagaagagaggaccacaggcgagaaagtggcagcagcaagagaagatgtaccatgaggaagttctgggaggttctgcccgtctttctgagaacaggggagagacagagctgagttacaactgcactgcttcttagcttcttagtttctcttcagaattagtggcaaagaagagttttcgaagtctttagcatgtattaaacgaagaattttgtttataagaaaaaattgtggatcgttcccatgtttgtctggaaaactcttgttaaacttttgtgcagctagtaaattaagtcactgtttattctgtgtagtggaaagcatgcttaaactctaactcaggagacctgattccaggaatagttaagcctgagttcattataaaccacttaagttatctgtgtcattattctagtctgttaaatggagggcttgagctggtttcttgtaaggtgggatttggctaagtgctcttggatacagttgctcacctctttgagcctcagctttctttttggtgattatttaatcgcatgtgataacaaatacagggtgttttgtgtaatgcctggaatggcactgagattgtctccactacagtaaggaggtggtttagaaattagctaatttattaattaatggcctatagagcttcatgtaggttggtacttcaaagtcccattcatatggatcatgttcatatttatatattcatcacttttatttcaaaatctctttttctgctgagatcaactgagatttctagaaagcagtcctattgtcagcactttgcccagtacatttagtaagaacttgactagcattgactcaaacagttctcttagaagggctggcaccttttgtttcaatttttttaaacattaactgcccataataattgaagcatgaatgcactttctttggattatgaaacaaatcaatcacagacatgggaattaggtgtgttctcttgctttgttcaatatcatgcattttttttgtctgagctttcactgtgtccccagaactgtgcttggtgctaacagtggccccacagagtacggctttatattcaaggagatgacaatcttgttggaggaaaaaccttatacatagaacaattaaggaacaatgcaagggaaacacacattgcaagttttgattgtacctattttatggctatggtataaaacaaagcacctgttgttcctgagagtgaagggataagacaataactacaaaaaggtgaaatgagttaattcaaaagggaacattgagcatgtcattttcctattgaagtgctattatttggtatcggcttcctttggtggtgttggtttttgattccctctgccccggactctgttgtttaaagatgttctttctatgagggatcttggatgcattttagcagtgtttccactgccctttgttttatattctttgatgccatcccaggtacatcacattcttgctagatgagtaaaggtaagcatacttagaagtcaaaaagaaaaggctgaagtggtgacttagacttgagaaattatagattccatggagaaaactgtgtttaaatcacaggacaggctgaaaactcacattaccacctgatggaagtgaactctacttttataggttactaggagaaggtcagccttctgtaaaagcagataaacaaggataccattaccagagtttcaagtaatttaaattaagaactgaacattgatactgatatgatttctagtttattatctgtgacagaacccagtagcttattgaaaaactatcatggaagaaataactaagaaataaccatttaaaatatatcaggatataatgaggatgaagctttagataacacaaaaaggcaatttctctttaggctgaaaaataccagacacagatatatcgacagagtgacctgccagaatccctactttccagcccatctgataaaggtcaacgattgaacacccaaacacgttgatacacacagcacctgcctgatgaaaaccgttaacagtgtttttctcagcccagagtgcactgttttcttaaagttttgaaaacagtaatctaaatttccctattccatgagtaaagttctacttttttctttttcacactaaacagcattcgatgttttagctgaaagtcaattaagaaaaatgtattgtgtctgtgtttttcttgctttcttttaagcacctctaaaagaacttgttcttcttcctgaattgagaacgaggtaggaatgaaagactgaaacggtaactctcatcataattttattattatgacaagttgggtttatgaagtatttttccaattactgcctccaattgttaaataggtagataacatgccagctttaactgccaaaaacttgtagtccttaaaatattttttgtagtattactattagtatcatgaacagaaatagcagtgataaaaatcaaatcaagttttgtgaacaccaaaattccatttgcctgtgtgtggagggtggtttaggattggtagaattaatattctttgcaaacggctgcacctagcatggtcgccttgaagccctgggagttctctaattttcctggctcgagagacttccattaaacaagaaaatgaggtgggaaaggtcagaggattcacagggtaacaggaactggacctgaacctgagcttcatgcagtccgcagattttttaagtggtttgttttttagaagtgtttgtcacgacctctaaatcattgttaatttcatcgttaaactggcctcagagagattttgttttaaagagacaatgcagttagaggatcgtgatctctgaactcagaagcccagaactccaaagctggaagccaccagatcctagcaagtgaagctctgtcaatctggagccgcagattttgaccacgtgtgcacagcctcccatctgggcaagcccttttctctccaccactccactccacagcttctgtttcttttcttttctttttttttcgctgaattcatcatccctccctttcccatgccgagacttaaaaggtttcaaatacttcaaaaatcaatgatttctaaatcacctcagatgacttacatacaatgttttattacattttcccagagcagaatggcatattaagaaatggttttattttcaactatattttctcttaggaatatagagacattatctcaaattattacctcgaagagacagagacaagaattttgcaccattctagttctcaaatcattttaggtattttatttcattttgcctaaatctcttagacggttatttcctcgtatcacttaaaaattacattttacttgggcagggcctaaagaattacattgaaaaactaagaaattattgggaaaaaattccattagcacaactatcatgatcagaagaaattggctaatttcagtgtcttttctttgggctcttcatagaaaattgttgaaatgtgtctttcataagtaactggcattctgaaattgatttaaagctgtagaggggaagaaaagctacattggaaaaattaaatcttaggtttggagatattttaaaaaactcaacaagttccatgcccagaggagtgcagacactgaccctctttttcagctattagaggtgaggaaaaaaagttgtgtggttggtgtggagagagagagacacacgcacttcctttagccatcatcctactaacaccttcacagtacattttcttgctaataatcccaaccatttctacagggaaaagtgcatgttcctgttctctggtagaagggccacccaaggaattcaggttcctggtgagtaagaatgacagaagtacccacagctcctgggccattggtctcctctatccagcctccactgaccttgctgggtccactgcagttttcttcttgatttaactctatgagctctctgttccttcaaagtactggagcttctggccttagcacatctgtttctgcagccagagcaccttcactgagaagcagacctctacttggctgggttcttactcaccctattggtgcctcttccccatccccctcctcctcctcctcctcctcctcctcctcctcctcctcctcctcctccagggaacatatagttggcagcaagggttgcagaacgaatgaaggcatgcatgaatgcacatgttggaggacgaaggttctgtttttactctcagtgcaccaaaacccagcagagttaaatagtggaaggttcttaagtgctcaagtgagtagatggaggtcataaggcaagcagagtgggaagggctagaaggagaagaaaggagaaagggaaggcaggagaggagagaggtggggaaaatggaagggtagttgaatgtcatagcaaattagagttagaagaggagaattagtagaaaacagagctagagtcaaaaacagagtgagacagacagaaattcatagatttgctgtctggcccagatctcattggataactagagcctcccttcttcctttgggttgaatggtctttactcattctttatgtagaccatcctttacttccacatggagtttgtatgttcccatagacaccaatactttacatatcagaacacttgtcattttattaaaaattgttttttattagtttcttttcccactagacagtcaatgtcatggatgcaggactatagggtcttatctttttcatcacagtagccctcgaacctagcacagtgaaagttgcccataatacattactaaatatttgttgaaagcctaaagcactgggcaaatcattttgactttccagacttcaggatccccatttgtgagggagctggtctatttgatacctaagactcccctccagcacaggtcttctataattttgtatctacatggcttcctgcctgatgccaggaacttaagatttaactcaagaagacagggatgttgcttgcaaagaccctgaagatcttgtcatccaaactgtgactgcctggagactgtttatacaggatcttgaactgggctaggagagtgcaatggatggtagtcccagtccttgtttgcagggagaggaagacagcgacaaagcatttctatggaaagaaggagttgctcataagtctactatggacatcaaaatatgctgatgagccacagcaagttcattacaaagggatttcagatagaagcctcctccttcagagtgaggaggaagaatcatccaggaaagagagaaattatgtgtatttcatatattgctgtatgtacatattaatcagccagcaaatattaagtgcattcatgggcaaaatgccaaagagatgaagagaaaaatcagactccaaggatcatataatctgattgtggaagaaaggcatattcatcatgaaaatgtagcaaagatgttaagtgagtgtcttagtctattctgtgctgctataaaaaatacctgagactgggtaatttacaaaacaatttatttctcgtggttctggtgactaggaagtccaagatcaaggcaccagcagattggttgtcggatgaaagttcagtttctgcttcatgcatggtgcctccagaggacaggaacactgtgtcctcatatggcagaaggtagaagggcaaaagaggaaaaaccctttttttttctttttttttgagatagagtctcgctctgtcacccaggctggagtgcagtggctcgatcttggctcactgcaagctccgcctcctgggttcatgccattctcctgcctcagcctcctgagtagctgggactacaggtgcccgcccgccaccatgcctggctaattttttgtattttttagtagagacggggtttcaccgtgttagccaggatggtcttgatctcctgacctcgtgatctgcctgccttggcctcctaaagtgttgggattacaggcgtgagccactgcacccggccagaaaaactctatcagttccctttataagggcacctaatttcattcatgagggaagggccctcatgcctaatcacctcttaaagccctgcctgttaatactatcgcactggcaactcctgagttttggagggtgcacattcaaaccatagaagtgggataagccagacacttgggtttcctatgggtcctctccatttggttttcctgttaaagatttaaaagagcagaaacactactttattagagaaagggcatttgaacttggcctttgaacatggcaggatttggccacttagagattgggggtgccattccaggtagagagaagagcaaggagaatggagagcacttggcatttatgagaatagtgagggttcatgtcaggttacatgaagctgactcatgacaaattaatttggaaaggcaggttgtgaccaggctaaaggcatctggactttgctctagaggaaatgtgaaaccattgcagatttctgagcaagctgttggccagagccgtgcttcggggcgactcacaacagtggtaggaagctctttgggagctgggagagagagagagagagagagagagagagagagagagagagatgggaatccaggggagaacagaacaagtgagaaagcagctgcattgcggcccaggctggggttgctggtttctggaaagggggtagtgttgggggagtggggagaggggttaaatgtgagcttctgaggaagtacaggaggggtgaattccaccatggagaaagtattcaataacaagcctacagagaagttgaggaaggtggaggagtaaaggacaatgatgtcctcgagaaacctgctcatgaaacctgctcaagtaaacctgaggaggcaaaagcctgattctaaagtgtgagagagcaacagcacaacctggggaggtggggtatcaagtccgaaccaagggtgaagggcagggactcaggtgctggagtgtttcaatgtggatcttggggttggcacttgcttgctgagttaccttgggcaagttactatgtggtcttagtttctgtaaaatggagatcatgatgtaaccacttggtagggctgttggaaggatggaaggagttcagaaacagaaagctcccagcacagaacctggcccgtaataaacagtctatgtgtttgctatcacgagggtacttttaaagaaatttagtgcagatgagtataaatgagacgtggagtgagtagcagaatcaacacaaggtttttcttataatggatgagagattgtaaaacacatttgcattggggagaaggacacatgggagagggaagaaatggaagacacggaagatttgttggaggcaaatttagatccacgacaaaagtacgggagtaagtgcatggggaaaacttagtattggagggaggaaaaatggcctcactttgcacttcgaataacatctactttctttacctggtcctccaaaggccaccagggccagcctctggcctgtttctttagccgtaactcctccattctcccccgctgccatttgcacatcttgcattttctcagagctgccaagatggtcgtggccgggccttcctctagctagcctatcttcctgcagagcccttccctcagcttcttacttggctgaatctgttgtcttacccagctctcactttaaattccgaagtccttccctgaccgtcaggtccaaagtagccattcaacattccttacattacccgtttttccatctttacatggcattgatcttcacttggtgattccttgtttatttatttattggtgtactgcctgcctctcttcaccaacgtataagcttcattacagcagagacctcttgcctggtcatcacagtatccttggctcctggcacatggtaggagcccagttaaacgtttgttgaataaataaatgaatacatccttctgtaatatgtgagaaaagtgggaggcaagtctaggtgaagaaggcacttaaaaaaaaatttttttttgagacagtcttgctctgtcacccagactggagtgcagtggcacgatcttggctcactgcagcctccacctcccggaatcaagtgattctcatggctcagtctcctgagtaactgggattacaggcttgcgccgttacacccagctaatttttgttttcgtttttttttttttttttttttttgagacggagtttcactcttgtcgcccaggctggagtgcagtggcgcaatctcggctcactccaatatccgcctcccgggttcaagcaattctcctgcctcagcttcccgagtagctgggattacaggcctgcaacaccatacctggataattttgtattcttagtagagatggggtttcaccgtgttgaccaggctggtctcgaactcctggccccaagtgatctgcctgcctcggcctccaaaagtgctgtgattataggcatgagccactgcacctggccggaagacagattttgaagtggagaggagttagaggaaattgagtcatacttaattttatctgaaaatcatgaagtaaaataatacatagaaagtgaaggggtgaacttctgggtgtatatattcaatggaaataaaatcagtgtcaaaggtttctctgcacccccatgttcactgtagcattatgcacaatagtcaagatatggaatcgacctgagtgtccatcaacagatgaatggataaagcaaatgtggtatgtatacactgtggaatactattcagccttaaacaagaagaaaattctatcacttgtgacaacgtagatgaacctggaggacatcgtgctaagtgaaaggagccaggcacagaaagacaaattgtgcatgatctcacttacatgtggaatccaaaaaagttgaactcgtagacacagagaggagaatggtgggttgctggggaggaaatggaatgcggcagaaaggggagatattggtcaaagggcacaaagttttagttagataggaggagtaagttctggagacctattgtgcagcatggtgactgtagttaataatgatgcactgtatacctaaaaattgctgagcacagtagaacttaaaagttctttttaaaatttttattttaggccaggtgtggtggcttatgcctgtaatcccagcactttgggaggccgagatgggcagatcacctgaggtcaggagttcaagatcagcctggccaacatagtgaaacctcgtctctactaaaaatacaaaaattggccaggcatggtggtgggtgcctgtaatcccagctacatgggaggctgagacaggggaattgctcgaacccaggagatggaggttgcagtgagcctagatcatggcactgcactccagcctgggtgacagagtgagactctcaaaaaatattattttaatttttataaataaagacaggttctccctatgttgcccaggctggtctcagactcctgggctcaagcggtcctcccacctcggcctcccaaagcgctgggattgcaggcgtgagccactgcacctggacaacttcgaagttcttaccacaaaaaaatgataagtatgtgaggtggtagatatgttaattagcttgatttaatcatttcacattgtatgtgtgtatcaaaatgccacattgtacccaaaaatatatgcggtttttatttgtcaattaaaaaaaagagaggggactataggcacacaccaccatgccaggctaatttttttgtatttgtatttttttttttttgagacggagtcttgctctgttgcccaggctggagtgcagtggcaccatcttggctcactgtagcctctgccttccaggttccagcgattctcctgcctcagcctcctaggtagctgggattacaggcacatgccaccgtgcccagctaatttttgtattgttagcagagtcggggtttcgccatgttggccaggctggtctcaaacttctgacctcaggtgatccacctgcctcggcctcccaaagtgctgggataacaggcgtgagccactgcgccaggtcatttttttgtatttttaatagagacgaggtttcaccatgttggccatcctggtcttgaactcctgacctcaggtgatccacccacctcggcctcccagagtgctgggattacaggcgtgagccaccatgcccgccctaaaccttttttaaaaatatgttttaacattctttgtgctcaaattcatgatcaattttttttttttttttttttgagatggagtctcactctgtcacccaggctggagtccagtagcacgatctcggctcactgcaagctctgcctcccgggttcacgccattctcctgcctcagcctcccgagtagctgggactacaggcccccgccaccacgcccagctatttttttttgtatttttagtacagagtttcaccgtattagccagaatggtctcaatcttctgacctcgtgatccgcccgcctcagcctccaaaagtgctgggattacaggcatgagccacggcgcccggcttcatgatcaaattttgtaaatggttgatggatagatgaaaaaaattctctaattgaaagacataaggatcactgtatgatcagcaaatgtagataaatgaatataatattgattcacttctaaaagaaatatattgatgtctcccactataattaaattttaatcaagttcttggacttctaaatagtttttgccttatatatttggctgttttcacgtttggacgcttcactttattaattattgtatctcctttgtaagagtgtaccattcatattacataatctctctatcttgtttggtcaggttttccacaactaatcaaaatgccttggtattaacgtgactctttttcaaagtagcgtggacaattttgctgtcatcatgtagtcctgggtctttgggttttatctttctaagactgtagatctcaatcttgagtttatcaatataatctataaaaaattccaaattaagccaggcatggtggctcatgcctgtaatcccagcactttgggaggccgaggtgggagaatcacttaaggccagaaatttgagatcagcttgggcaacatagtgagaccctatctcaacaacaaattaaaaaactgctggatgtggtagcgtgcaaatgtattgccagctactcaggaggatgaggtgggaggatcacttgagcccaggaaattgaggttgcagtgagccatgattatggcattgtactccaggttggagtacaaactttcagcttgtcactgaaaaaaaggacactccatatcactttttgccattttgtgtgtgtttacacatctatctatccacattgtgcttaatttggactttacaaccaagtgatttttctccattataaaagaaattgcatcattttcttttttttaaaattttactttaagttctgggatacatgtggggaatgtgcaggtttgttacataggtatacatgtgccatggttgtttgccgcacccaacaacctgtcatctaggttttaagccttgcatgcattaggtatttgtcctaatgctctccctccccttgtcccccaccacccaacaggccctggtgtgggatgttcccctccctgtgtccatgtgttctcattgttcaactcccatttatgagtgagaacatgcagtggttggttttctgttcctgtgttagtttgctgagaatgacggtttccagcttcattcatgtccctgcaaaggacaggaactcattcttttttatggttgcatagtattccatggtgtatatgtgccacatttcctttatccagtctatcattgatgggcatttgggttggttccaagtctttgctgttgtaaatagtgctgcaataaacatgcgtgtgcatgtatctttatagaataatttataatccttttagtatatacccagtaatgggattgctgggtcaaatggtgtttctggttctagatccttgaggaattgccacagagtcttccacaatggttgaactaatttacactcccaccaacagtataaaagtgttcctatttctccatatcatctccagcatctgttgtttcctgactttttaatgatcgccattctaactggcgtgagacggtatttcattgtggttttgatttgcaaggaaattgcatcattttccactgaacctaagttgcagttccattctgcctaagaccaccaaactcacctgccccactgttataccttctggatgtcagtgaaagttcatggacaagagaatatttgtaaaactgcattggatttctgttgagaaatgctatgttttcaaaaggtgaaaaaatgtagacatgtattttcagaccttttatttttcaatcatagcagtggaattccttgatggtttatgaaaataaatgtttttctcactcctaggccatttaaaaatatataatatggagttgaagttattaatagaaataactaagggtgagagagaatggcacttgtactattgagtacaatattagaagcaagtgctgttatattgccagactatataaaataacaagtgtttctagtgcactgagtgaatgtatggtttagaaaacattactaattacgtgcgtattcattgatttattcactaagtactcactgagggtctactgtgtacctgagtctagccagaggcttgtggtggagagctgagcaggtcaggtccaaacttatgttcttgctatttctttgggtgtgggtggttggatggttagctcagtggtctcggatgctggaatttgttctaataagtttctgagctgcttcataaaccaagagggttaggggaactatagctgagtcatctccttttcctcctcttcctccttcttcccctcctccccaccgtctgttactactattataggaaatttgaactggaatgaaaaaaaaatcagtgttacaaaaatggtcacattttggaataactctacacttacatagtgtgttctagtgattagaaacaaaaaagccatcattttaggctagatttttcagaatgatcacaatgctaccactgttttgcacttaccttaaaaaataaagtgcttcccctaagtttgatcatttgcttgttagcataatttggccattaaacattaagcattgtttgagacccgtaagtcaagccaggctatggtgaaacaaaattagcaaaattcgaattgatgccggaaactggtgaagccgccatagatttaaggaccaatttgccaggttaccgtctgcaggttctgctatggaccaggtgggggcagcagagagctggctgtggtctccagaagggaaggccagcacctgcctgcagattccaaggcacaggtggaggtggtaatgagttacgaggtagagtcaaggtttggactgcatctgagaagggaggaaagcaagagagttagaaacaccataaagatgagactgcagagcaagccagaatggaagtaggacaaagaactggtgtaagtcaaagagcaaaggtgcaggggtcacagggaggagaggttgggtgggcagacaggaggtgcccgaaggaggccagcctgcttcactagtgccccttccagtaccttcccaactcggtgagccaggtccatacttggttctgtttggtcttccaagggctatgaagggacagggatgtgagagacaccagccatctctctctcctgagctattaataatgaaagttcctgttttatgaacaaatactgaaatgaatggagaacactcaacaatttggtagcaatcagggtgtggtagtgaagcattgcctgggcttttccttctggttcctgcaaaggactaaggtcctcagcagcctctgtccatcttttcggagatttttcacaatcaccaaggaaatatagttcagtgctcctgtttacttaatggtcggctacgcttgaaatatcatgctctccctgtgtggtcttgtcataattattttcaaatggtgctaattagcagacccaacacatgggcagccttccttccccagacttggcaccctcactcgctgcatttagcacccctcgtgggaaggcatcctggagatcccttatctgcaccctgtctccatctaccccttcccactcgcggaagctgcctcaccagagaaactgctatctgataaagaacatcaacaagtcctagcagatggctgcttatctcaagacacatatattcaccaaaatcctagcagaagaaaaagctgtgtttggatggtccctgagagctaactataacatgttcaaactgtgtaacgcagtttggagatggagacagagtatggagaaagaaagacaaagggagaatacccaaaagaggttttggaaaagaagaaaaatttgttctttatacatatatatccataaagatgagggtctcactctgtcatccaggctgatctcaaactcctgaactgaagggatcctcctgcctcagcctctccagtagctgcaactacaggtaccaagctgagcaagaagaaaaatttgagttaggctttagaacatcaaactaagactctgattttcttgagaaagtggatagaaaatttgtggttagagatgacaccagtaacgataggtttctactcttagctatgcctggggcagcttgaccgccactttgttgatcacattaatttacctcttcctgcctttatttccctttctgtaaaatgggaattaatgtgcttgatgacaatatctccaaatgatttttaaggcaagaagagagaatgttactgacaggcccatggttctctgggtgagagggtcactgtgaatgaatgtacacacagagccttttattagtgaggcttagggtgtccggtttttcttggcggagtaaacatccacccagtagtattcactcagtttgcattgttctgtcgcattgtttgtaaatcttttgagtgattacgcagcatttgttccctattgttcataatactctttaaaaagctgactataggactccagtccccactggtttgttctttgccacttggcaaaggttgattgattttatttttcctttggcctgtgcttcttagtggcttgaaatgaacacggctttttttcctgtttacccctttgcccacattgtcaataatagagtcgccctgggaagcagagtttgcaaagggaggagggtttggtataaatttggaagattgtattgtttcagatttattttctcaaatgctgaaactgcttctcaggggttatacttctttactcatgaaaactcacacattctcttaggtggtactgttaaacatgttacatctgtaaaaaaattaataaaacgtaatgaaagaagcaggaagcaagtgtatacacatggtggcctgagcaattggctgtcatggtttggtttgattataggtgtgtgaggcacatgtatggtgttgcgtggaacagatggatagaagtggtaaaaaagatgaatccaacctagtgcttttcaattctccttgcacatgagaatcacctggagaattaaaaaaaatacattgatgccgactgggcacagtggctcatgcctataatcccagcactttgggaagctgaggcaggtggatcacttgaggtcaggagtacgagaccagccgggccaacatggtgaaaccctgtctctactaaaaatacaaaaattagccaggtgtggtggtacacgcctataatcccagctacttgggaggctgaggcaggcaaatctcttgaacccgggaggcagaggttgcactcaaccgagattgtgccactgcactccagcctgggcaacaaagcgagactccatattaaaaaaaaaaaaaaaatttgatgcctgagtctctccccaaaaatcggaacatctgtgggtgtgggttcggcatggatatttgtaaagtctccgtagctgcaaagccaagttgggaaccactgataaccaacagaaaaatgcttctggaagtgtttccggggaaggagtcctagcctaggatcagacacctgtctgggctcaatacaaaccactggttttttttttttttttctgagatggagtcttactccgttgcctgggctggagtacagtggcgcaatctcagctcactgcaacctccacctcctgggttcaagcgattcccctgcctcagcctccagagcagctgggaccacaggtgcatgccaccactcctggctaatttttgcatttttagtagagacagggtttcacactgttggccaggatggtcttgatctcctgaccttgtgatccacccgcctcggcctcccaaagtgctggaattacaggcatgagccaccacacccagccaccactgggttttataaactctcagtaggcctcctcttctggcctggtcccatgctatctgacccttcttgacattcaaaaaaagtatttttctttagttgaactccaggaacatgaagtggcattaaacagaagtatgaattgcctttattaaaattgcagtggtctttttcttaccaaaggtcctgacccagttgtggaaaaattgtttcttgaatgtgggtgacacatctgtttcatatctccaaggcaatgcctcagagccaactcctcccccgtgtgactcaaggatgccacgtgtcccacatgtggcctgttttcttctcttaacatggcctaaaaggcccttattgaactcccgttagctttatttatttatttttgagatgaattcttgctccgtcacccaggctggtgtgtggtggcgcaatctcggctcaccgcaacctccgtctcccaggttcgagcaaatctcctgcctcagcctcccaagtagctgggactacaggcgccttccaccacacccagctaatttttgtatttttagtagagacagggtttcaccatgtcggccaggccaggctactctcaaattcccgacctcaggcgatctgcctgcctcagcctcccaagagctctccttagctttgaaagtaaaagccaaccccttttggctggcccatgaggccccacacaccttagcattcctgttacctctaccacctcctctcctaactctgccctttgctggtgccaatttgactgcactagtgtcctttttgtgactgcagctgtgcctgggacactccggtctttgctcttgctactgttctgagctgtttatgtccagaatgctcttccagcagttagctacttgtttcctctgagtcttcaggtagctgctcaatatcagcttctcagtcaccctgtctgatcacctggcttataagtccagtccctacccttgtactccccatctctaatccctgcttaatcatcgccttagcactgtcaccatctgactttctttctatatatattttatttattggttagctcggctgcttcaatagataccataaactgggtggcttaaaatcagacatttatttcccacagttctggagggtggaaatctgagatcagggtgccagcatggtctggttctggtgagggcctcttccaggtgcagacagccaccttgctttttttcttttctcttttttttttttttttttgagttggagtctcgctctgtcacccaggctggaatgcagtggtgccatctcgactcattgcaatctccaccttccaggttcaagtgagtctcctgcctcagcctcccgagtagctgggactacaggtgcacaccaccacgcccagctaatttttatatttttagtagagacggggttttgccatgttggccaggctggtcttgaactcctgacctcaagtgatccacctacctcgacctcccaaaatgctggggggtcgtgagccaccacgcccggccagatggccaccttctccctgtgtcctcatgtagcagaaagagatcaaagagctcttttgtttcttttatgagagcactaatcccatcacaaggccctgacctcacaacctaatcaccttccaaaggccccacttcctgtcgccatcatattgggggtttggatttcagcatatggattttggggggacacaaatctttcagtccgtaatagttggcctcctcccttgttccactagaatataagcttcaggaggtcagggatctttgtctcttttgtttacagctatgttcctaacacctacaacaatgcctggcacatggtaggtgctcaggagataattattggatgaaaaaaaatgaaccggtctcctccttaacccctgaaatcctgttcgagtcgctgggtttgccttgctccactgggatgaagtcctggcttggtgtccttgtctcccaggggtagacgccccgtctctgggaggacttgaggctctcctggcctgctgcttggcctccttacctgttctgcccactcagagccctgccagctgcctgggatggctgccgggcacgtccttgttcctgctcagtcaaccagttggggccttggtttggaccttcacttattcttctgtgaacctacctctctggtccccagctcgtcttctgaaattttgatgtgttggtcaagcccagtcttgtttgcacatccctgtgaatgattcttaattatatttctggctggctctgtgcagtagaccatagaaataacgattgtttctggggttgcgctggagtgtgaacaggtggggaaaatgcctcaggacgattggaccgaggagactctgagatgactgatgaaagcgacagcaagagctttccacgctcctgatggcaggaggggacggcggtgctgaggggtgggggaggctcagggggagctgttgagggtcccgtgctcgtcaattctctagcttctcaggcgccttgatcttgtcatttagaagcctctggaagcacagggactgtggaaactggaagctgttcttggactatttcgcaacacttttctccaggaaaaagaaaaaataaaaaaaagcctcattctcttcgtccccaatgttacataatcgaacatttcccgtcctggttgaaatgaatatcctctttgcctgaataaataatgcacagattcttcgggacaggctgcttcctccaggccgccgcttccaagggatccggtcgctttgtgggtttagtggtggcccacagctggacgcggggtccagcttggggtgggggaggcggtgctttctgccaaaatgtcttttaaacgtctcaacaagtagcaaacaaggccccacctgcgacagttgtagtgattccggaagacctgctcaccacgaggtgctggggtcgcttgcagctggcagtctccggtggctgcagtttaaataaatctcctaagtgcagaatcaccacacagggcgcggagaaactgaaaagttaaaacatctggagttacaaacactcacaggcctatcagctgtctgagtccccgtaggaaaactgtttatcggatgctttagtattcaaccttttatttcctagcacaggttttttgattttcacatggagtgtttgattattttcccatgcccaagtcactgttttcatagcctgttgtttaatctgtgtgcacctttgttttcactctatttcctttgctttcctatatgagaaaaataaatggcaccattgaattgcacggtagaggctgatgctattccaggtgctcaggttggctttcccatctttcgtttcctcctgtaggaagttttttttggtataaagggaaggacagaattggatctccctggagggagtttcatgtgtttcttattctgagctgccgggagctggttcacagcacaacttgataattgctgagtagacctaaagttttgaaaatcaagatctctttggagttttacaagtaaaatttcaaaaatgagaaatgactatcccaatttattttagaagaaaggtgcagcttgtaaactttcatgaatttggtaaaagggggctaatttgaaaaggaaaactaataggcaatatttacaaattgtgaaaaatatcagaatagtatacgtggaagagttattagacattccatttgcagtggtaaacccattcctttgattctgaatcttgtttaggtttccttaagaatttgatgaagttttcagactcttccttcagaaaaatgcacatattcttatgtacctaaatgtttggatatgatttcaggggattccaaatcccctggggaccccccatgtggatgtttgtgatgcagaatggggtaagaaaaccaggagagcctacaaaaattttatgaaatagaaatatgaacatacagtactgagccaaaatttagttgtgaggaaaatgatgttaaatgcattcattttctaaatgatgacagaaaattagactcatattactatccgggtgaagcatattttgtacttatggtgacctagtgatccaaatgcctgctctttggtcttatcctcttatcttccttatgtcaatactgggctgcttaaatatgtactgtctccgatgtcattatctagttttgttctttgttttctatgttttatcttttacttcttgttcctatttcaaatactttgacggtattgggacttggggacatgtcctttccagtacagattttggtattgtagagggaggtttacaagcccaggtgggtgtacttggggactgaggctgctcagtagccctgtaaatggtcagagtctgctgtttctgttgcttggagagcaaggtgaatgcaggtctctttggatattggggatgatagagggatgtggattggagaggaacaggacttcctgccccctcaatttaaatggagattcatttgatcaaaaaaaaaaaaaaaagcacatatattcaccaggccctgtgtgaactaccaccttggatgtaggtggagtaagccatattcccaggtagcctgcaatcaactgcaatccattggtggtaggaggcatgggagatacagaagtaactcaggactagattgaattggccacttatctaagagtgttatcaagtgttctgtaaatgtgtgaattctgattagttatcaggttgtcatacatttttttttctttttttttttgagatagagtctcactctgtcgcccaggctagagtgcagaggtgctatctcaggtcactgaaacctccacctcccaggttcaagcaattctctcacctcagcctcctaagtagctgggattacaagcatgtgccaccacgtctggctattttttttttttttttttttgtagttttagtagagatgggatttcaccatgtggccaggctggtttcgaactcctgagctcaactcatcagcccacccctgcctcaaaaagtgctgggattacaggcgtgagccaccacacctggctacgtgtcatacaattcatttgtctcccttcctagacacaagctcctcaggatcatatgtgttcttccttgctggcacagaggagatgcttcagtagtgcttgttgctagaggagaagggtacaagtggcatgtggagagattcagagaagggtagaataggatgatgttgggccatcaggaaggtctccatggagaaggtgtgctttgagatgaacactgaggaagtggtgggatcacacctgacctagatagagaaggggctgaaatccaagcataggatggtgggagcagggaaagagaggttgactgaagttgaaggctggagaggttggctggagacgggtgatcagggatatggtaagtggtttgtgcttaatttaatcttgcagtaacacggtgaggatgattaatcgggaacataatctggtgaaggtatgttggacggattcgaaatggtagaggctgtcggcaaccagaccaattaggacaccattgcaaaagtccagctgagagctgaagaggatctgacttgtgacagggagtaggacaaacaagggatggaggctggaggtattttggagatacagcctgcagttcttataatccaaacttccccagaatatctcagcccaggaataaaaataggatgaaaacaacaataacacaataatattttatctctgctttctatcaactgtttgcaacctgcaattctttctggttcttccttcctgcggggccaggtgaacaggcaggtgctgaatatcactgctgggctcacagaagcccccagtgctggggggccaaggctgcggctgctggtgccaatcaaaggcacccataggcaggaccctcttccactaggtttcattgcaaacgggaagcctcaaggcaggcgctttccactgctaatcggtacctggtacaggaattaaggcttcactttgtttgttctgaggggtttacagagatttttcttctgtaaagccactgctcctttcactaaaattccggagtttgtgcaagctgggaagttaaacttagcaacagagtctctgctgtatttaaatatcatttttgtctgacactggcctcctttttttttttttttttttttttttttttttttttgagacggagtctcgctctgtcgcccaggccggactgcggactgcagtggcgcaatctcggctcactgcaagctccgcttcccgggttcacgccattctcctgcctcagcctcccgagtagctgggactacaggcgcccgccaccgcgcccggctaattttttgtatttttagtagagacggggtttcaccttgttagccaggatggtctcgatctcctgacctcatgatccacccgcctcggcctcccaaagtgctgggattacaggcgtgagccaccgcgcccggccactggcctcttgtccttagaggaaatatgtgaatttctcctttctgctcagaagtacaccttagtagttgacaaacgtaaactacccgaagggccagccttctctggatcctacttgagaccttgcttcctgctgagaagtgtgtgcatttgtgtatctggtgatcgagatgtctggaagagtggggagaagactgaggggcagatggggagtaagaagggtcagaaagctattttggttcagcagtatcaataatgtttttgctttaaatcattgtcttcttcaatgttgcttcctttgtcactcctgtaaatatgatagcccatttattcttctaatagaaaatttttcataattatttcctcacataagatgtttatggctttatatatatgtgtgtatataaagaggaggcacataatttatgaaagcagattttaaaagcctttctacagatgaaatgtaaagttcaattgcattttttcttttggagatgggtcttactctgtcactcaggcaaaagtgcagcggcacgaacgtggctcactgcaacctcaaacagttctcccaccacagcctccaggtagctgggaccacagacatatgccatcacatccagctaattaaaacaattttttttttttttttttttttttatttagagacggggtctttctacattgctcaggctagtcttgaacttctaggctcaaatttcttgatttcttccaaaagtattttctgcttgacattgtcatttgaagaaagatagttttaaaaaaatttgaagaaagagactatttttatccctataagcttgaactagggctttcatactgagtaaaagacagtatacagtgtcattgaggatgggtcatattatggctccgttgtcgaacactctagatctggacactgaaaagtggactactgatggattttatgcctctgctataaaaaccagcacctggggctggacgcagtggctcacgcctgtaatcccagcattttgggaggccgaggcggccggatcacgaggtcagcagatcgagaccatcccggctaacatggtgaaaccccgtctctactaaaaatacaaaaagaaattagccgggcgtggcggcgggcacctgtagtcccagctactcagaaggctgaggcaggagaatggcgtgaacccgagaggcggagcttgcagtgagccgagatggcgccactgcactccagcctgggtgacagagcaagactccatctcaaaaccaaccaaccaaccaaccaaccaaccaaccaaccaaccaaccagcacctaggccctggatgcgtgtttaaggtagctaaacactcttaggttacactattctgatgggaaagaccaccagaggtgcccttggatacctggtaataagggctatagaagaaattatggaaattctacaaccctgtcagtgactatagccaaccatgcggctatagccagaccctgcaatgtgctcatgggtccagagccccctatgtgttatctcagctcatgggctttctctgttcctgcataacttcacttgctaggaggctttccttactttggcctccatgccaccctgagacatgcccttgtcctttgcggctcatgacctcagtgcaggtttccaaattcataccctcagagcttgaatgattggtccagttcatctttttcacatttggtcatgtcctaggtcactggccagtctatagtttggctgatctttggttgggtgtctcaccatggtccagttagctgtgatctgaagtgggcgtagggtggggaggttgtatgaacttgagttggttgttcaagtaacaggagctgagagcatggcaattttccttagaacgatagtgagtgagtggtcaggtactgattgatatctccaggtaagcagagtttcaattttggttgctcttcacgaggaaagccagaagcccagagctgttttgctagagtgatagaactgagatagtgttttgagcagtgcccagtgggaacatctttgctgagaagaacgaataaagaattttggcaattaactatgtaactgagtcccagactctgctatcatctggggtggcagataaaaacacacagtccaaataaaaaacctgattttttattttagcctgaatcacccagatcacagcaggattttgcttgaacaacccagacagattgcattcattttctgctttactgtgcttgtggaagccaggctgttagtggtttcttctggaatgggagaatgtatcacaaaaaggttggaacctgaaaaatttctagaatttcattgttctgtgcttcttaataaacaatgtgacactatcaaggaatgtgtgttgaccctctttttttaaaaaaataaagatgtagtggatagcacaattttgatgaaatgtcaggctttatttttcatttgaaaaatgtgtgtgagggaatcaggtgtaatggcatgatacatctctttaaattatacttacgagattaaatttgtcctgtgtttcaattacactgtattatactgcttcatttaaattgttgttttcttcttttttaattgttcaacctaattgtctaatagtgatgaatgcaatttaattagacacttttccttgaaggatatatatatattttccctataataaagcacagaatagtttaaaaaatgtattggtccaagcacacatttttatttttagtgatttcattagaacaataaacttcaaaatgattcataacaacctttctggattgatttgatggaactgtttttacccattcactgataaacctgtcaacagtttcctctcatgacacatacaaagcacgtgtgttcccatagtgtgtccttgtgtgtaattcccttgtgctggttcagattctgaaatggagctttaaaagcatggaggcttgagttggtccatgtgagtttgaaccctggccgcagctggtatgggtacttaatctcagtatcccacggtttcctcaactgcaaaatgggtttttagtagtacttacctcactgggttgctacaaagatgcttaaactagtatctgacatctagtacagccagccctccatatctgtgggttccacatctgaggattcaatcaacctctggttggataaaaaatatctaggaaaatagctgcatactaggggaaaaaaaaaagaaaaaaatatccaggaaaaaaattgtgccagtactgaacatgactttgctcttttcattctctaaacaatatagtataacacatatttacttcacatttacattgttttaggtattataagtaatctatggattatttaaagtatacaggaggatgtgcataggatatatgtaaatactatgtgattttatatcagggacttgtcctggaaccaatatcccaaccctaatactaagggatgactatatatgctcagaagacatttgttgtcatttttattctcttgcactcaagaaagcacatattggaatgcaaacgaatatcaataatagttttttaaaggataattaagttaatttataatttacatacaatatacattgtacatttatattttctaatgaaaaggaaataatctataaccttcagttcagaattcattagctgtcctattttgagaactgttgctctatgtaattttcgtctctgtattgatgtgtaaaactggttttaacaggtagctaaatgctgtttgaaaagcatacttcacccattctggcaactaaaataattgaaagatttaattaatttagaaaaaaatttcgctttcaaaacacttgaactgttcagagcatgttattcaataatctacctttcaccagaaatcataataaacacaataaaaatgcttacagaacccccacaatgcgttagtatacatgattattccttgtgtaagtgaatcttgttgagattttatgctcagtcaattgcaattaaatactttatatattaactaaaatgtgtcctgctctatgtattctggagaagttactctcagacaaatttacatatttaaattattttatgggctaactgataagtatagagaagactgaagacagttaagatcattgatttcaaaatgttttaaagtgttgattatttattttggttttctttctttcccatgccagttttgagatgcacctcttacttggcaggtgttcctctgtactgggtactgggacagagagaaatacagtagcaagagggagatcctgcctccgccccattctaccattctcactgccagaaagccagccttttttcaaggcttgtagagaagaaaaagagaaaatatttttaaaaattcatttaaagtacctactgcataaaccacaccagacatgatgagatattaaaatgtcaatattattaaaaatttttaatatgattttacagcccctttgctactttaaaatgtttatcttagtgttaaacaaacaatcaataacctcataaacttaaaaattgctgcaggaaataccggacagtttatggaaggatcatatgacagaaggaagggctgaagagtgtgagaagctagacctctgcaggttaccgaagtcaagaacctcattaatcggtaacaagaagtgcagagcgggcttttgagtccatgcctgagtaagaaagtcccaaaaaacactcacagaagatatttccttgcccctgcttttagtttagctgtagctaactttggattaacaaaatttatgtgctgaatgatgttttatttttttttccaactccacatgcctgtctagacttcaagctttattacgaataaagagaaaatcggctggatggcataaaaaatatttcaggcagattaacacatgatttacctcttcttgaacatccatcttaatggaagtgctaagaaagttagattcgggcctggcttggcaaaagcaaggccaccccctcctctattttttcaatgagattttccaatcctagtcaaatggtggtgctagttctttatttttgagttactgcatttcctaatttcatggtcataacagcctcctgtctaccgactcagaacggattttaccaaaactgaaaatgcaggctccatgctcagaagctctttaacaggctcgaaaggtccatgctcctttctcctgcccattctatagcataagaagacagtctctgagtgataatcttctcttcaagtaggtactcctatttcttctcaatttattttttcctttttgatataatgtgctactgtttacaagcatattgtaacttcagagcttacctctcatctttaaaaaatgttcatttttttgtctttctgctccaaggatattttgcaaagttactggcaagtattcctgggatgataaaatgtgaaatctaaacttggtacagtggaaattcacttctagaataatatttagctgaggcagagggcaatccgactacccttttcttagtacagcacacacaggctgcctgtctgttccagataacataaatgtattggatctagcactagctaggagacactgtattgttgaactgtgttagaattttataagctcttaattggacaaatctcagagtagcatgaacacactacctgttttctgaatctttggagccataacttacgtgagtttgaactaagcgatgtgaataagccattatttgtttcctaaaggcagtcaagttttctgaaaagctacacatttagcagcaaaagaacgagcccctctgtcttgaaatgggcctctgattttaagcaagctcttttgagtcctggtgtcccattttctcagttcctttttgcctcacaatggcacatacataatgactccaccacatatagcagtgggctactcgggtaatgatgtggcagtcacaagacagggcagaatactttcattttggttagaggaatgccacatgtcttaggaaatgctcgctgaactgtaagtttcatactttgtcaagaagataaccagtattctctcaaacaagtccgtaggagccaacatgattaaaagattttaaagcaatttactcgatagaagggttgggcttaatcaggacttgtgatcatggcaatggttcctgcttaaaggtgcccagatttttaatgcctttttgtgccagatctaataggcttacagagcaactccatgtatatgaggttgctgggaaactcatctggttttgaatgtggtatatacatattttaatattgagagtaaacttaggaagaccaggtagaagtatttgaactgaattctgaaacgtacagagaacttaaattggatgagaatgtttgagaaccatggatggttcagggtccatttgtataccgtaaaatcccttcctatttctcaaaagcaaatgttttctttgattttgttaatatcctgtgatgactgcccactaggccttggaatgcatgcagataatgctgtagcagttggataaaatactctagaatgtcagattttcaaggaaattacaaataaaaacaatgtaggtaaaagatacgacatgtaggaaaaaagcaaaattttccttaagaatacaagcgtcgtatttacgagtagaagatttttcttggacatttggagatacttgtttcattttattgcttgtgacagtcaaggaaaggaataaagctcttgtgtcttaaacttgcagcaagaacaaagtccaactatctttcgtttctgataactctgtgtctttttgttcaatattgggtttagagctagctaccatctaccttcccttcaaacactcactctaaacctccacacagtgtaagtatttacatcaggcatctgctaaacattttcacatggttatctgcaggtcttctctgagtctgtctgcattcatttatcctagttgctcagaacaatcgcttgggctgacggcctggtggttgagtttactttgctttgaatagggaacagctgtgctccaggactgcagattggctattcggaaaaaagggcaaggaagagagtgacccagctctgggtagaccatccacactgtaaaaaaaaaagtcatagcatagtcttcatctatggcagtggagatatggtcctgtccatccacctctatcaggagagggtctccattgttaatctctgagaaagaggctccatctgtgaaacctcctgcatattgtctaatgaagtgctattttgaaaggcgtgcactgtacaggtaagagtgatgatggtgtgcctgccttctgggcaacatctcagtagacttcctctgaatcattcccactggacccaacagcaaaagcgtacacatcattgagttttatcgttctatctaaggcgtataacatttttctctctgaaagtctgtgattctttcggagaatgaaggggcttaccctatccatctgcccctaaaaatattcgctggaaagctgatacctctgctcaggttttccacagcagatcactcttcagtaagaattctgatattaagtagtttaattcagatccatggaaaatgactgagtaccagccatagctcccaccactctctagctgtgcaatttagaggcagattatttaacctcatgccttgaatttctcatctgcaaagtgggagtactaacagtagctaccagatatattatatggaataaatgacattaagccactcattaaactccttgcagtttccaagcattagaaactcagtatgaggaagttatttctattctaagcctagcacagtgcctggtactcaatacatgttggttgaatcagtgaaataattcaaggtcagcaccaaagctgctaggaatttatgaacatctgatcataactggaaacttgatctaaaaagcaaagggcagtcaatccaatcaactgagcgtaccatctgttgaaatgctgctgcttctgtaatgagtataaagtgttggaagagaaagtccaggaacctccatcattcttccttccatcattcctctcctttgtgactatctttgtgatgagaagggtaacaaaaaaatcttgctgagatgagcgtgtcaaaaacgtgttacaaatgcttcacattccctttcacatcaacagaagcatgttgcttcattgttgggcaatgtcttagtccatacacacatagagctctatgctgatttttttttgagatggagtctcgctctttcaccgaggctggactgcagtggtgctttctcagctcactgcaacctccgcctcccaggttcaagcaattctcctgcctcagcctccagagtagctgggattacaggcatgtgccaccatggccagctaattttcatatttttagtagagacggggttttaccatgttggccaggctggtctcaaactcctgaccttaagtgatccactcgccttggcctcccaaactgctgggattacagacgtcagccagcatacccggttgtatgctgatgttctaattcaatgtgataccaaagacctgagatagtctctcccactctggccccataacatatgtccacgaggtggtaataataacaactatagtagcacctaaggttggggcagctcttactttgtgcgatgctttttatagtgttattacgtgtgattctcacagcaaccccaggtggtgaacaacgttatgattcctgttgtacaaatgaggaaactaaggctttgcaaagctaggtaacatgcccaatattacacagcttcaaaagtgacagccctaggacttgaagataaactcatctaattccaaagctcatgcttttagccattacttgagacagtattaacttttaaagtttgtaatcaatatgaatttggccttgggaaagcaggttaagcatctggggttgatgggagataacattacaccctctcttagcctcagcaacttcatctgtaaaatgggaataattacatccgagtcacagaagttttgtggctcttcatgaggattaaataaagtaatgcatgtaaaagagttttgtacaaagttcacttttataaaatgcaagttgtggccgggattggtggttcacgcctataatcccagcactttggggggctgaggtgggtggatcacctgaggtcaagagttcgtgaccagcctggccaacacggtgaaacccgtctccactaaaaatacaaaaattagccaggagtggtggcatgggcctgtaatctcagctacttgggaggctgagactggagaatcgcttgaacccgcgaagtggaggttgcagtgagccgagattgtgccattgaactcccacctgggcaacagagtgaaactgcatctaaaaaaagacaaaaaaaaaaaaaagtaagttgttatatgcaatgcataaattattacttagttccatgtaaaatcttcccactaagtgaatgagggttcacctggctgtagtgctatgagatagatatgaggggcagattggtttatgcttctcaaaaacagaaagtgtgccagggtggaagtgtgggtggggagtctccgcctcccagccatgtggcaaagctggaatgtgagtacagcagcagtatggatgcggttttgaggggatggtggtaatcctcttctggcggcacccctccagtattgtgggatgctctctgatttcttttgagaagacaagtagctaggagcttccctagcctttctgttgtaaaaaccatcaagatccctgttgaatgcatacctggagcttggtttccctaagcacagactttaataacttcatttggttttagtctcctatttaaagctgccacccactctcaattttttgggttttcctactaagaatggatataacatgggcagtcttccagttctcctttcttgctgccttgaagacaacacacaggccaatcacaaggaggcagagacaggccccaacaagttgacaatcctagagagcttagtgtgagtagacttgctgaggttcctgacttttgctggaataggagagtgccactggctttttgacatttctttttccaactgtttccttgtcaaaatgaccagcagctcagctcccctaaacatacctcctcccctagattggttcagaggaagccatcaaggtccttttgcaaacggatgatctgcatttttgagatccttctttcctctgctgttcatagaaatggtctcattggaataattccttttggaatgttactaaggacaccaagaaatcaacaagaaaatttgagtgtatctgacagaagaaatttggcttttgtactctaataattatttattagaagcaataactggtcagaatttatttgcttaaaaccatgtaaagaaaggtgcttaataaagataattgcatcacatatagtaatccgttttagtatctttcaccttaaaactatgtgacaaataaagacacaaattgctctttctttctaataagcaattttggaaattccttattgggaaattccaaattttacaaaatttacaaaatttaaaattttggaaatcgtacctgcatcaagttttctgaaagaatatttaaggattaaggttacttagaatccaatatatgcatagtttaatttaactcatattgttaaattctttttctaattttatttaagaaatgagtaatattgacaagggccttgctgtggtttattatggcttgtcctagagtctctattcccagctagattaaaagtgcctcagggctgggcatggtggctcatgtctgtaatcccaatattttgggaggctgaggccagtgaatcagttgaggccaggagtttgagaccagcctggccaacatagtgaaatgctatctctactaaaaatacaaaaaattagccggacatggtggtgcatgcctgtaataccagctacttgggaggctgaggcaggagattcgcttgaacctgggaggcggaggttgcagtgagctgagataacaccactgcactccagcctgggagacatagagagactccatctcaaataaataaataaataaataaataaataaataaataaataaataaataagtagtgcctcgggtgcatagatggggttgttcaggtttctaccctgtgccttgggaagtgcctggtacacactggtgtttggcacataattgtagagtgagattgagcctggcatgttccttgatccctagacaatctctatcaggtgtgatcagtaaggcacataatatgatatgtgactattacagagtagcacactacaatatgtgcctaaagccataacatcaactaatacaattcagcagagtagaatgtgaagagtgcttgcagagtgctgagcaccacggtgaggaagtgtaaagagaagaaggtatttctgggttggtgcaggatggttagggatagctttgggtaggaagcgactcttgaccatgaccttaaaggacaggtaatgtttacatgggaaaatacaaggaaaaggaggtgcataatgaaaggcatgggggaggtggttttgggaaaccatcagtctgacagaaacatagttaagaaaagtgcaaggtggtggtaggaggtaatttagaagtggagagtcagatgtcctattaaggagcttgaactttatcttgtaggcattaaagatgttggtgtaggattggaatgaaataaagacttaaccttagaaaaatactgtgtggattgaagttttcagatgaagagtgggtacatcaattcggaggtgagggaaatagttcaagggaggtgtcacaccattaaaaaaaatcttttaggacttgttttttgcaatcatgattgtttatggttgtaaagattttgtttcagaaatgattggtggagaaagaagtgtattgagaatcaaaagatgggactgtgccactgatgtgcgcagtgagaagctgcaagcttggtgccccatcttcctaactgtaaaatgggcataacaactaccagacagccgtcaaaacattatactagtgatacaatgaagactaagtgatataattttgaaaggcagtatgccttatatgtgtaaaatgctgtttacttggaatatttttatagtaaaattattttctttggacaagatatagatgcagaagaaaatgatcatatttctgtgagattaggattcagaccatttgaattttttatatttattaaataggtactttatgttgggtactgaataagtcttttatttttaacacctcatttccctcacaaaatggatggcatctttggactaggggaaatgtgtggtccctgcagctgtagtattttatgattctatagcttttgcctttagcaaacttctcttagaatagtgatttaagggctgggtgtggtggcttacacctgtaatcccagcactttgggaggctgaggcaggcagatcacctgaggtcaggcattcgagaccagcctggccaacatggtgaaaccccttctttactaaaaataaaaaattagccccgtgtggcagcatgcgcctgtagtcccagctactagggaggctgaggcaagagaatcgcttgaaccgggaggtggaggttgcagtgagccaatattgtaccactgcactccagcctgggcgacagaacatttaatgctggtggctcacacctgtaatcctagcactttgggaggccgaggtgggtgaattgcttttgctcaggagtttgagagcagtctgggcaacatggcgaaaccccatctctataaaaaatacaaaaattagccaggtgtggtggtgcacgcctgtagtcccagctacttgagaggctgaggtgagaggatgacttaagcccaggagatccaggctgcagtgagctgacatagcgccactgcacactgcattccagcctgggcaacagagcaagatcttgtcttaaaaaaaaaaaaaagtgacttaagatactgacagtataaacacaaccaaacccatgggcatctgtgctgggaataaaagacagacatgttttcattgcactgatttaggattctgcttggaaaggaaaactgtgatctctcctgcagttgcctaaaatgctttacagttatgggaatggaaaagctaaattctgtgatttgtgggtagagggaaggaggacgagtgtcctttctgatttcctctttttccttctcttccaaggggaaataaaaggctagagcaacaatttaaaaagaaaaggcaaggagctactgggggtagagtcgggagggaaaaaggccaaacccactaaataatttcacttcagttacagtaaatctcaaatgatgatgctacactcctgagaatgttccatggtggaaatgcctgggctttgaattttgagcagcgaagtaccaggagagggtgacatgataacattcaacaggaagaacactgctcttgtccgtttgacggtcctattcctccggatcactcaatcttcacaaatcaagcatatagctccttcacatgtcatttgtgaagggaaagactcctaggaaaatgttttctaggaaagggaaaaaagcagaaagcaaaggtctcctgcttactacagcattcgtgttgcataagcagtattaatgtagtggagtattaatcacttagaacagttcacgtattattcctatctgggctctgcagggtcctttcttcacttctttctcgacatttggattctgtccattttactcctccctctgcacttggaatagaagtgaaatttgttgtgccaattctctgcttgttagaagccatggtaatgtttagtaggggaaaagctttgtactgctacatagaaggaggttttgggattatttaagactttactttgttgatgggattcctagaatctactattactgggtatactagacaagtttgtagatttacaaaagtgtggataacatgggttgcacttgatttctttatccagctctttggttctaaatttattgccaattttatttatcaaaactattctcagcggagtagtattttctgtggacacaaggaaacatctgtgagcttaaaccttagaggcagatagccagttagaacatttggcatatgaagcttagatagcagaagagaaaaattaaccaaggcaaccctcaaaaatattgagaaggcaactaagaaaaatttcttatcactgacagactgcagtattgagttcgtgttaatgaagaaatgtcagaatacataatgaatcaataaggagtgtcatattatggcaagtttcaatgttggtgtcaatctcgactgccaggatttatggtagattatataatggaatcctgagttctgagagatcaaaggaaaatgctggctctttcttcatccattctcttaggtcaagcctatgcagcaagaagccaagttgagaattgagcaattatctgaagtgggcagtggagacggccaaaccagataatatataaccagaaagtcaccgtggagggaaaatgtggactgaaaataggataaggggtggaggtagaatgtcaagccatttggtcagtgtccacagtccaaatttactgaataacagccaattccttacttcatgtggttatttagagcgagactagaggacaagtgaaaaaaaaaaaaaagagttcattcctaaggttgttgcatgtttgtgcaaaatttcttcaaatctctgttattatctgttacatgtctaattctgagtacttccagagattgcatttcattactttagattagtgggttgaagtggtggaggaagcccatataatctgacttacatggagaaaacaagtctttttttatagtttagttgagtgttatatttaattagcctttttttccctccataatgcatgcttatgaattttccacttaaaattctgaggctctgacctttatcatttcctcatggagcaatttctgtacctccttaactttagtagaacatagcaatgaaatatacaagtcccctagaatagaatttgtgtgaatttggttttctaaaaacacaactaccaaagtctgaggaccagtgtggtatttttttcttctatttgatatggaaaccataaactacttactttgagcagatgtttcccagtcctaaaatacagctatcagtccactggcccctataaatctgttggagtgcacctgctaattctgaagcctccctaatacaatgttaaactttcctttttttttttttttttttgagaaaaaaattgtaaattaggttcactgttgcttggaattaggaaaaaataaaaacacaggcatactaatatttcagatggaaaaacaaagttaagaattcaacaagtttttttcccccactctatcatgtcttgcacatttaaagctgttatacaacattttaaaaacaaaccaaaaaaacccagggcctttttccaacagcttaggctgatgacccacagtaaaaaagtgccccatgggatattcttaaagcaccccaagggagtctattgaaataacttaaagtaaaaattcagaagaattttacatgtaattaaaaattaagaacgttgttttataagcaatagggaaaagctgtattaagttgcattgctcaatttctcacttgctctgtgcagtgactgctttttcaaccatgtaacaacgtctgaatcttcgtggtaaaatcatacctatcacagccacagcaggttttgttctgctgctgcacatgtgatttgagatactgtgggctgggagttttttttttttttaatttctaatggcaaaatggatctatagaaatggaagtcatctgtaatctcagcactttgagaggctgaggtgggtggatcaccggaggtcaggaattggagaccagcccagccaacatggtgaaacccatctctactaaaaagataaaaaattagctggcgggcgtggtggtgtgcgcctgtagtcccagctacttgggaggctgaggcagaagaaatgcttgaacccaggaggtggaggttgcagtgagccgagaccgcaccgttgcactccaatctgggtggcaagagcgacactacatctcaaaaaaaaaaaaaaaagaagaagaagaaatggaagtcatcccgtgggcctgagttggtgtagtggattatggcctgtgcgtgaatgaagaaatacttgccaatggcatcagtggtaactagcttaagccctactcagctttgtaaaataatgtaatcaaggaatttgatctgaacaggtaagccaaacattgattcttcagtgcctattgataagtgagactacttttctttttaacagccttatttcacttaagtggggagtcaaactagctttaattaaggaaatctgtagaaatcacccacatctccctttccttctctgttaaaaaaacaaaaggaagaagaaaactaggaaggagtaagcacaaagatctcttcacattctccgggactgcggtaccaaatatcagcacagcacttcttgaaaaaggatgtagattttaatctgaactttgaaccatcactgaggtatgtgtgaacatactagtttcctctttctctctcctgactttgtccgtaaattgataagatctaatttggtcatcagtttggagaacgatttttcatttaatttctttcattatcaagtgtgtattgtcaggggcttagcagtacacctactatctgatgggcactctacatgcgttgcttaggttgaaattaaggatacaatctgtgcactaccaccatttaaaaaaatccccaagtctactgtgtgggtgaggtttctttgcatagtatcagagaggttaaccaatttatttacatactcaatagtccactctaagtagggaaaatccaagctttttttttcttaagaaagagcttttcattcttttttccctcagagctttaccatagtttccagcaagtgaaaacatttcttgatttgaatttcacaacctccttctcctcttgccagttgtatggtgctaataggaagcaaaatgtgagtgtgcttttaatttaaccctaaaataggggaatatcttcagaatttagactttacatattcagtgacctacctaaaaatagagacatagttctaaccttctcaatcattaagaaacatttctattgaatttaattattcaaaacaacaggtagcagtttcacaagggaaaagacaagccatgccacttgtatttgtggtcaccaagtaattacattattttttatttaaaattaagataaaataacttactgactgtcaagtccatttctcatttcctccatagaacattttaaaactagttcacaaacctcttgaaaagtcatgcctctagaaagtgcaaattgtcaccattgcctagaagccaacttgagaggctgtgtatctatgcagcattttgcaaatccagtagcaggcatgtgatataaaagattaaatgcacccctgatttgtgaatactatcctagccttcaaaatgttcaaaagcacaggaagtctgcacttttaaaaatataacctgcccaaattgcaagggaggggttgggtgtaggacctaggtctgtctgccaatcagcttgagatgccagtggacgaaacctgacttcactaaaaaccagactggcaaatattactcagcgtggtaatttcctaattgtagaactggcctgtttggtgaagtatttcaggaaaatttttagctggaccttttctaccctactgcataagaaatgaaggtttctaggcaaagactttacttagtgactaaccaaaaatggtaaataaagtcaccgcttccaggcttagctactgtcctcaaaacagctgcaggactggtcaggccagtcttctgaggctggaggtgcatgtggaacccccagagccttgtctgcaagggcatggctgactgcaggctgtttagaagcaccccgccccgtgaaactcctctggcttaggaattttaaacagttctagttctaatctctctgctcagagtctgagcagctgtgaatgagctctcctgtgaatcacagaaatgttaatgggtgagctgctctagcttcttacttccaagtggaaggcgcctgtagctctttgccagcttgatgcagtgagtttgattcctcttttgggcagcagggagagataatgaaggagggggaaaaaagattttaatatagaaacgagtcttccatctggctgaggctgaacaaagtagaagaaccagtgcaagtcactgggggtatggatctcataccattttcagcatatacctccctttctctctttttgattctacacatgtcagtccctgagtagtcttgcattgctttccccactttgaagtcttagatccaaaactctgattccagaaaggtctaaggtgctgttgctgagattttgaaagagacctgagacaaactgttgggattctagacgctattgcgcatctgcctgggtaactgtgtcacttaggttgggtcaccagaataattctcctccatttttgctgcctttccaatttataaacaacacagaacatcagtggttctcccataatcaaatatatttggctctattaatattaaaatttgatcttgagtagaaagattctaagggctaaaaaataaaagatgtaaaatgtatgttgataggttagtgtagaagccacccatggggttgcccccactcccactctttcatattttttttaagaaacaacactcaagttacaaagtcgattctttttttgttttgttttatttgagactgagtctcactctgtcaccacccaggctggagtgcagtggtgcgatcttggctcactgcaacctctgcctccccggttcaagcgatttttcctgcctcagcctcccaagtagctgggattacaggtgcccgccaccacacccagctaatttttgtatttttagtagagatagagacagggtttcactatgtttcaccatgttgaccaggctggtcttgaactcctgacctcaggtgatccacccgcctcagcctcccaaagtgttgggattacaggcgtgagccaacgcccctggccacaaaagtcaattcttaacttaaaacataaaagttccatttcttttatggtctacttagtcatgtctggagtcagtgagctcagtcaagtagtttgcagaatgacagttgtgatacctattcatttacccaccagattattttctgctctcccatggcactttatagaaaacagtttattcggtcattacaacagctctaggagggggtttcattaaacccactttctaggaaagcgaactaaggcttagaaaaatcaagtaatttgctaaagactacccagctggcaatgatatgacaggacatgaacttaggacaataactcaaggtcttggtccctgtaaatatgggtttccaggttatgtatgcaggcagagggcttagatcctgaagtttccttcagaaacttcaggatctaagccctctatataggagcagtataaaaaggaaggatctcttcccatagggagcttgtcatccattgaatgaggaactcagacttccactgtgaaatgatatttgtatccccattgtgtgcgagatatggggactctgatcatcataagagcacatttttcctgcctataaatgatacttaatagagctgacagattatatatatctggaacacttttacctagcagaaagacaacaggctaggattagctgactaataattttatttatcaagctcaattcccatgctgacttctcttcctctagtgaaaatgtgtcatcagatttggtcccaaactggagaggtgaaaggatcctttgaccagtataatagccatgccatcagttttgctttcctaattaagttttatatgggttaatgatctatatcattattttgggggtttctaaacacatatgaactaaagatggaaaagatgatggaaaagatggaaagaagatgactcagatgtacaaaggcttgcagagagaaggataagccaaaaaattggtaaatcacacatgaataatcaagaactgactacaatataataatatgtgtccatttccactaatgaataagctgccattatgtctcttcattctctatttaggacaaattacttctctgctgtatttccattcttacaggtacctatctgctgtgatttttcccagttttgactttatcttgttgctttaatcttgtctctaagtaagctgcaacccagtaaatatattccagtattgtttattgtaattcctgcctttatgtcaggtggcaagaggaagggactggttttattaatttatcagtctgggtgtgtgctaagaggatccttagtacatgctttgattatggtagattgagtctaaaagattcagctggtttattccatttattttggtctgtctacctaacaaggtcacacagtggattatactagttttctatgtgtcatattgttggcctgacacataatagcaaataagaggtaccagaattttctgtacagtctgaagctgtgtgtgtacaacaaccagtgaaaaatcttagttatttggacttttgggttccatgatgccagagaaagccagacaccagcagctggaatcagctaagacctaagaccctgcatgcacatatagatgtttacattttcttcctattgcgacattcagccattgctttggcgcctatttcaataatatattgctgctcatcaaagtggaaataatgttttgttactagctgagtattgaaaagctcttcatagttttgtgattttgactcagctccaacatgcaggacccatttcttcaactgactttggcaacaggagagattgactagtgggcttgaaagtgatccactgctgtttctgtttaactttcttcaatcctactgggtcttgggaagaagaggtagcgggcatccttgtttgcctcaaccaggaagcacaaggccatcccagggcggggcaggagagaggtgggagggaagaagcaggctccacagggccattgtttaccttgttggcgggtcaggtcttctcagggtagggttcctgggataagagcaaagcttattggttttccttgctgtgccacgagagcacaccagatcacccctgcagccttgcttgccttcccacagcctgcccttgcctagggtttcagctgatatcctttctactcaggaggagaaaccacagaacacatggaggaagtgtttccagtgttaagactttagaccaaactatagaaatctgttctacctggaaacctgaagaaataaatcatgactgctactcagtagaagtaaaataaaaaaacagctttactggtttggaatcataggaaggctttctgtatagcctctctgagagctgcctactggaaggatttgtcctcaaaacgtgaggatttgtggtgttccagggtttatatgacactggcaggatagtttgctagagggctgtgcttcgacctttatccaagggatgtaagccgtgtgtttaggttagtgagcgtctagcacaaagctctaatgttgaaggagcattggaggcaggctgtgcctctgaacatgtagaattgactagaaatgccaatgttcatttcaaaatgaaatcattatctttcttatgcttccatttaaaaatgattattacatttttgcatatggttgaatgcatattaattttagcaagtttagaaaagagataagcataaagacatacataaaaatcacttattctcatcagctatagataatcactaacaatattttaggacattttcttttcatctttttcttagcaatatgtatgtgtgtgggtatacatatttaagtgtgtatatatgtaaattaaaaaacataaaatattcccacaatataattaataaaaatctaagatacaacacaatttccgtttgtaatatgtagtgtatatatgtatatatacacattatatgtatatataaaatacatgcataaaatagatacacaggtatatattttgcaaattgaaatgatgttgtatcttgtagattttatttaacattagaatttatttacactacttaggtgttttaacaaggattgtggtccaccatttatttccttaagagtaattccaaaaagtggaaatagaatgtcaaggggcaaagttctttataaagtccttaaggagtattgccagatatatttttttttacttccttttaaaacatgattgtattgtagaagttctctttaaaaattccaagcaaaaatttttcaaaatcccatctagaaatcaaatcatgattttatttggctatgcctcttgtagtccttgtctatgaacttattctattattaaatataataggtaatttccactaatttgacagatagaattttattttttacattttctcttgttacagtgccatgcatatttctattatgttacagagatcttgggggtcttttttcctccctttttcctttctcttttcttgttctgtaccccttcacagaaaccaacaaatacaggttgatgtgtatcctctactcttttctccatgctcacacaacccaatatttacacatgcactgatttttcagggcaatggtccttctttatcataaattgtgggataaggttatatacataatatatgtgtgtgtgtattactctgaatcttggttttgtcactttgcaatatgtcttaaagattctgataaatcttatagatctatctcattcttttcagtagttgcatgcagtataaatttactataacttattcaagtaatctgctttcagctgatactctgttgtgaacagttttcaacatataaaaaagtgctgtcattacaaatattcttagatatatattcttagtaattgggggttttatttttatggtgtaagtcccaggagtagaattgctggtttaaaaggtatgtgtatttttacatttctattggttttttcatattattttctaaaaatattatagcaaatcacagtcccactagtgatgttggagagtatcattttcctcactagtactcctatttccctgctttctaatctttcctgatctaatgagtaagcattgttaattttcttttcattttcttgacttctaatgagcttaagcatcttttcacattattgttgttcctttggattttcttatctgtcaattaccaatggatatccttgacctatttctcccttatatggttgcttttctcttattaaaaatttgtaaaagttctttgactattacagattttaaaaactggcagataaagttgtatgatttattgtgtataatatgatattttgagatatacatatatcttgatatatcaatatcgagatatatatatcacacgttgtggaatggctaaatatagctaattaacatgtgcgttacctcatgaagttatcatttttgtggtgagaacacttaaaacctctcagcatttttcaagaatataatatattgttattaactatagtcaccatgttgtacagtggatctcttgcacttacttttccgatttaactgaagttttgcatcctttgaccaatgtctttccaaccctcacctcccacccctctgcccgacactgccccagccccggtaaccaccattctactctctatgtctatgagatcaacctttttagactctacatataagtgagatcttttggtatttgtctttctgtgcctggcttatttcacttaatataatgtgctccaggttcatccgtgttgttgcaaatgacaatatttttctctttttttaaggctgaatggtattccactgtgaacatataccatattttctttatccattcatctgttgatggatacttagattgattctacatcttggctattatgaataatgctgtaataaacatgggagtgcagatatggctttgacatactgaatacattcgctttgggcatatacccagtagtgggactgctgagtcattcggtaattgtatgattactgttttccatagtggctgtactaacataccttcccactaacagtgtgcaagggttctctttactccgcatccttgccaacacttttaatcttttgtccttttcataatacccattctaacaggtgtgagatgatatctctttgtggttttaatttccattttctgatgattatagtgatgctgagcattttttctatagattttttttttttggtcagtggattgctaaatcttaccccgtcaataatttctcctttgattttacttttataattttctgctacaaaattaaaaaataattgtatgaaataaaatttttcttcctatacgtattctgaatttcctatcttacttcaaagagtcttcccacctcctattttctaaaattttcttctaaaaatttctatgttttattttattatttttaatatttagtattttttacatctggaatttttttatataaaagtggaaggctcaactgcatctctttttatataaagaacgaattgtttaaacatcacatgttaaataatcttttctccaataaattaaattatattagcatcaatttaaagattttttttctctaaaccactaatctatttatttgttgccaggcctgagacgtattgctttgattataatagctgtatagtctcttttaacatttggcaagtttgatgctccctactcattaatattatttataatgttagcctggttttcctttttttttttcagtccaaataggatttagtcagaagaaagatacgtggattacatttttaaaatactgatcaaaatgaagatgctccaaccgtataaatggcagatgaaatagactttaaagtaaaaaatatttatcacacaatatatcagaaaaatataacaaacccgaaccaacaaacatcagcaacgtagctccaaaatattagcttgaaacatgaaattgccaatagttgaccactttttgacctacaaaagcaacaatttatataaagaaaaggtcaataaaattatggtaaattgaatttttttttattattacactttaagttctgtgatacatgtgcagaacgtgcaggtttgttacacaggtatacacatgccatggtggtttgctgcacccatcaacccgtcatctacattaagtatttctcctattgctatccctcccctagccccccaccctctgacaggccccagtgtgtgatgttcccctccctgtgtccttaggttcccacttatgagtgtggcgtttggtttgatgttcctgtgttagtttgctgagaatgatgattgccagcttcatccatgtccctacaaaggacatgaactcatcctttttaatggctgcatagtattccatggtgtatatgtgccacattttcttaatccagtctatcattgatgggcatttgggttggttccaagtctttgctattgtgaataatgctgcaataaacatacatgtgcatgtgtctttatagtagaatgacttataatcctttgggtatatacccagtaatgggattgctgggtcaaacggtatttctagttctagatccttgagaaattgccacactgtcttccacaatggttgaactaatttacactcccaccaacagtgtaaaagcattcttatttctccacatcctccccagcatctgttgtttcctgactttttttttttttttgagatggagtctcactctgttgcccaggctggagtgcagtggtgcaatcttggctcactgcaagctccacctcccgggttcatgccattctcctgcttcagcctcccaagtagctgggactacaggcgcccgccatcatgcccagctaattttttgtatttttagtagagacggggtttcactgtgttagccaggatggtctcgatcttctgacctcgtgatccacctgccttggcctcccaaagtgctaggattacaggcgtgagccaccgcacctggcctgtttccagactttttaatgatcaccattctaactggtgtgagatggtatctcattgtggttttgatttgcatttctctaatgaccagtgatgatgagctttttttcatatgtttgttggccgcataaatgacttcctttgagaagtgtctgttcatatccttcacccactttttgatggggttgtttgttttcttgtatatttgtttaagttcttgtagatattagccctttgtcagatggagagattacgaaatttttcccccattctgtaggttgcctgttcatgctgatgatagtttcttttgctatgcagaagctgtttagtttaattagatcccattcgtcaattttgccttttgttgccattgcttttggtgttttagtcatgaagtctttgtccatgcctgtgtcctaaatggtattgcgttggttttcttctagggtttttatggtttcgggtcttacatttaagtttttaatcttgagttaatttttgtataaggtgtaaggaagggatccagtttcagttttctgcatatggctcgccagttttcccatcaccatttattaaatagggaatcctttccccattgcttgtttttgtcaggtttgccaaagatcagatggttgtagatgtgtggcgttatttctgaggcctctgttctgttccactggtttatatatctgttttggtaccagtaccatgctgttttggttaccgtagccttgtagtatagtttgaagttaggtagcatgatccctccagctttcttttagcataggattttcttggctatacgggcttttttttggttccatatgaaatttaaagtagttttttctaattctatgaagaaagtcaatggtagcctgatggggatagcattgaatctattaattacttttggcagtgtggccattttcatgatattgattcttcctatccaagagcatcgaatgtttttccatttctttgtgtcctctcttttttccttgagcagtggtttgtagttctccttgaagaggtccttcacttcccttgtaagttgtcttcctacatgttttattctctttgtagcaattgtgaatggaagtgcactcatgatttggctctctgtttgttattactgtataggaattcttgtgatttttgcacattgattttgtatcctgagactttgctgaagttgcttttcagattaaggagattttgggttgagatgatggggttttctaaatatacaatcatgtcatctgcaaacagagacaatttaacttcctctcttcctatttgaataccctcaatttctttcttttgcctgattgccctggccagaacttccaatactatgttgaataggagtggtgaaagaggatatccttgtctggtgctggttttcaaagagaattcttccagcttttgcccattcagtatagtattagctgtgggcttgtcatgaatatctcttattattttgaggtatgttccatcaatgcctactttgttgagagtttttagcacgaaggggtgttgaattttattgaaggcctttttttcatctattgagataatcatgtggtttttgtcattggttctgtttatgtgatggattacatttactgatttgtgtatgttgaaccagccttgcatcccagggatgaagctgacttgattgtggtggacaagctttttgatgtgctgctgggttcagtttgccagtattttatcgaggatttttgcatcaatgttcatcagagatattggcctgaaattttctttttttgttgtgtctctgccaagttttggtatcaggatgatgctggcctcataaaatgagttagggaggagtccctctttttctattgtttggaataatttcagaaggaatggtaccagctcctctttgtacctctggtagaattcggatgtgaatccatcttgtcctgggctttttttggttggtaggctattaattcctgcctcaatttcagaacttgttattggtctgttcagggatttgacttcttcctggtttagtcttgggagggcgtatgtgtccaggaatttatccatttcttctggattttctagtttatttgcgcagaggtgtttatagtattctctgatggtagtttgtatttctgtgggattgctggtgatattccctttatcatattttagtgtgtctatttgatttttctcttttcttctttattagtctggctagcagtctatctattttgttaatcttttcaaaaaaccagctcctgtgttcattgatttttttttgaagtttattttgtgtctctgtctccttcagttctgctctgatcttagttatttcttgtcttctgctagcttttgaatgtgtttgctcttgcttctctagttcttttaattgtgatgttagggtgtcagtttgagatctttcctgctttctcttgtgggcatttagtgctataaatttccctctaaacactgctttagctgtgtcccagagattctggtatgttctgtctttgttctcattggtttcaaagaacttatttatttctgccttaattctgtcatttacacagtagtcattcaggagcaggttattcactttccatgtagttgtgcagttttgagtgagtttcttaatcctgagttctaatttgattgcagtgtggtctgagagactgttaggatttccattcttttgcatttgctgaggagtgttttacttctaattatgtggtcaattttagaataagtgtgatgtggtgctaagaagaatgtatgttctcttggtttggggtggagacttctatagatgtctattaggtctgcttggtccagaggtgagttcaagtcctgaatatccttgttaattttctgtctcattgatctgtttaatattgacagtggggtgttaaagtctcccgctattattgtgtgagaatctaagtctctttgtaggtctctaagaacttgctttatgaatctgggtgctgctgtattgggtgcatatatatttaggatagttagctcttctcgttgcattgatacctttaccattatgtaatgcccttctttgtcttttttgatctttgttggtttaaagtctgttttatcagagactaggactgcaacccctgctttttttttgctctccatttgcttggtaaatcttccgccattcctttattttgagcctatgtgtatcttctgcatgtgatatgggtctcctgaatacagcacaccaatgggtcttgactctttatccagtttgccagtctgtgtcttttaactggggcatttaacctgtttacatttaagattaatatttttatgtgtgaatttgatcctgtcattatgatgctagctggttattttgcccattagttgatgcagtttctcgtagtgttgatggtctttacaatttggtatgtttttgcagtggttggtaccagttttacctttccatatttagtgtttcttttaggagctcttgtaaggcaggcctggtggtgagaaaatctctcagcatttgcttgtctgtaaaggatcttatttctctttcacttatgaagcttagtttggctggatatgaaattctaggttaaaaattcttttctttaagaatgttgaatattggcccccactctcttctggcttgcaaggtttctgcagagtgatccactgttagtctgatgggcttccctttgtgggtaacacgacctttctctctggctgcacttaacattttttccttcatttcaaccttggtgaatctgacaattatgtgtcttggggttgctcttctcgagagtatctttgtgatgttctctgtatttcctgaatttgaatgttggcctgtcttgctaggttggggaagttctcctggataatatcctgaaaagtgttttccaacttggttccattctttctgtcactttcaggtacatcatcaaatataggtttggtcttttcacatagtcccatatttcttggaggctttgttcattccttttcactctttcttctctaatcttgtcttcatgctttatttcaagttgatcttcaatctctgatatcctttcttttgcttgattgattcagctattgatacttgtgtatgcttcataaagttcttgtgctgtgtttctcagctccatcaggtcatttatgttctgctctaaactggttattgtagttagcaattcctctatccttttttcaaggttcttagcttccttgccttgggttagaacatgcttcttcagctcagaggagtttgttattactcaccttctgaagccggcttctgtcaattcatcaaactcattctccatccaattttgttcccttgctggcaaggagttgtgatcctttggaggagaagaggtgttttggtttttggaattgtcagcctttttgtactggtttattctcatcttcatggatttatctacctttggtctttgatgttggtgacctttggatggggtttctgtgtggatgtcctttttgttgatattaatgctattcctttctgtttgttagttttccttctaacagtcaggcccctctgctgcaggtctgctggagtttgctggaggtctactccaaaccctgtttgtctgggtatggaggctgcaaaacagcaaagattgctgcctgttccttcctctggaagctttgtcccagaggggcacccaccagatgccagccagagctctcctgtatgaggtgtctgtcaacccctgctgggaggtgtctcccagtcaggaggcacaggagtctgggacccacttgagcaggtagtctgtcccttagcagagctcaaatattgtgctgggggatccgtttctctcttcagagccagcaggcaggaatgtttaaatctgctgaagctgtgctcacagccgccgcttcccccaggtgctctgtcccagggagatgggagttttatctataagcccctgactgggactgctgcctttctttcagtgatgcccttcccagagagcaggaatctagagagacagtctggctacagcagctttgctgagctgcgatgtgcttcacccagtttgaacttcctggtggctttgtttacactgtgacaggaaaactgcctactcaagcctcagtaatggcggatgcccctccccccaccaagcttgagcatcccaggtcaagttctgactgctgtgctggcagcgagaatttcaagctcatggatcttagcttgctgggctctgtgggggtgggatccactgagctagaacattggctccctggcttcagcccccttttctggggagtgaatggttctgtctcgctggcattccaggagccactagggtatgaaaaacaaaaactcctgtagctagttcggtgtctgaccaaatggctgcccagtttttgcttgaaacccagggccctggaggcataggcacccaagggagtctcctggtctgcacccaagggaatctcctggtctgtgtgttgcaaagaccatgggaaaagtgtagtatctgggcaggagtgcaccgttccttagggcacagtccctcagggcttcccttggctaggggagggagttccctgaccccttgggattcccaggtgaggcgatgccccaccctgctttggctcaccctctgtgggctgcacccactgtctaaccagtcccaatgagatgagctgggtacctcagttggaaatgcagaaatcacctgtcttctgcgttaatctcactgggagctgcagactggagctgttcctatttggccatcttgccccttggtctggttttcaaccttcagtcttccatatttattttgaatgaattttctgcagctttattaaaaaagaatagaaacaagtaagagcaaagcatagttggtttatggttgtaataaacttatatgtatgtcctaatgatttgacagctttgtgatagtatcttgtaatccaagtacatgatatatttctacattatttagatcttgtgttaggtttttccataagattaattttcttcatattggctttcttgctatgtttctttttagcataaagctaatccaggaaaaggaataaaactggaaggaaaaaatgtcttaaaccattaatattggctgaccccggtggtagggttatgaatgaaacatttttgcttcttccacttttttatattttccaaattgtccatattaatcatgtatgatttttataataataaattaatgaaatttaagaattagataattgattgaattggataattgaattaataaaatttaagaatgagaataggaataattgtgctttgaaaagtcatatacacaagagttttagatggaattcaatactaaatttatatgctatactaaatcagtaattctcaaggagcaaaggtgctggggagtgtggaggagctctttgttggtgttgcacatacaatttaagacaacattttccttattcctcaccattttaaccatatcacctaaccagcctctggtagcactcaatagacatctgatgaatgaatgaataagtgaatgaaaacattgtgacaaaatggtataacattttgtatttgaaaaatatatgaaaatctattcttttcaaatataaaatgggaaaataaaattcaataaaaatatcttggttggtgagaatacacaaaagatataccttcttgtctatgaattagtaataagaaattgtcttgaggaagtcaactacatctggaaggttctctctggacaaggagcataagtgaaaaacagtgcactaaattataaccaagagttgcaacttaccattttaatgcttcagcacaggcacagagactaacatttactaagcaaacaagaagtcttggcaagttaattaaataatgaattatttttggtgaccaaggagttgggcttctcattttaaaaccatgcatgagatttttccctttctacccattactaaaatatcgtattagtgtgaaaaattataccaggactgggagaaaaagaaatcacatctgtccttgacaatgggctgaatgaagaggtgaaggagtggttttactatctaagtgactgaaaaataggttatggtgccccagcaaatccttgttgtttgctgacaattagtgatgtctgtttaaatcatgcagttttattaggccttaaaaatatcttttagttagtttcaatttcatcaagggaaaaggagagcagagtagagtggaactctgctcagagtccggttggaagccttcaactttgttctccctgttttcagatgagtgtctatttgtggctctaccttttctctttcttctcttaccatgacactcccctcttctctcttatcttagctgttcttttcttcttccgcatattaggcagtgggagaaacaccctaaatcagttggaggtgaggaaagaagaaaagcacccctatcttggtagttcctcattcttcccttcgtcacgtccatgtcatcaggctctgccttcatctgcgatctggatacaatccaatttatagcatccattcaaccaaaaaatattgagctcttactatgtcaaagtagtgttctggatgctcggctccatcagtaaacaacctagactaacatcttgccgttgtttacatctcgtggtgtagagtttacaccttgtggtctagaatttacatcttgtggtggaggcaggcagatgattaacaataaacttaagtaggtctagatgtcaaaaggtggtaaatgctacaggaaagagcaaaggtcgagccaggtaaggcagattggctgtgtgggtgtggaggaagggtgcaagagtactgtcaagataagccttcctgagaacatctgaaccaggacatgaaggacatgaggaagtgagacagtcgctatccagggaaggaatttccaggcagaagaaagagccagtgttacaccttaaggtgggagcatttctgcgagactggagaatcactggagtccattgtacttggagcccagcaagggagaaaagattggaggactcaggaggtgctggggcaggtgaactgctttttgattggggagttcagagggtaatgctttggataaatgtaactgaaaactttctcagaagtgttttcatactatctctacaattcattttcatgtgaaaacttaattggcgagcagattaatatggtgatcttcccttagatcactaggaaaatcttgttttatgaatttttcttcccttttcattcactagcagagaaaagagttgtaaaggagccgcagaaaattatagtaggtttctccctactactgagctactgagactggaagatgctcacgttagcaactgagtatatttatgtatttccctttaatgtttgaagggtcaggaatatttgacttaggatactagtctgtttagaaacatgattcaactagctacatgactaaactagcagctgtcagagagaatgcaaggtcaaaacttagtagttgataataataaagaaagggcagagtgttatgaaatgttatgatctgggtaatccattggctcacttttttttgtcagcctaaggttacaagatgataaattaagttgctaatattctatatctaccatttacttttcctttatcatgtgtctggcaatatgctgagtgttctacctctagcattttattcaaactgtgcaatctgcctgctgaaacaagtatcattaacttcatttcctaaggtgagaaaattgaggcccagagaggttaaataagtttaggatcatatgcatagctggtaagtactatactttaatatccctttgccttcatgctttgctctcactccatgtttaaatgagcagagagacttatctttaaacagatatatagcaagtagtattttccaaatgaattccacaagatgctccattgcaaaagttcaaataagtttagaaaaatgctgcaaactttgtgcttcttaagagatttacagtgcagattagcacattaaagcctttgggaaatttgtattagaaaaacctttattaacttatttaccccaatttttccaagctttttgatcacgaaactctttaaaaaacaacaagtataattgcttttatagtattctttgggatacacttggagaagtgttacatgaaaagatatgattggataaatttaaatataggaagaattatttaatcattttttggaataaaacaccaattttaggttgtctaacatacatttgagccaagacatgaaggacatgaggacataatttacttttgtccttgtaaggacataatgcacttttagtggtttgcattgtttattttcttttgaatttcatgttactttataaaggtaattatttaatcaaaccatttgttaagtgtcagacactatggtaggtgctggtaatataaagagaatatgtaaacatcaacacaacatatctcctagtatgggcttacagtacagtgagagacacaaacaaataatttgtaggattgaaataagtcttacatttgccacatcaataaagcactatggaaacaaaggcacaagaacttaactttgtccaatgaagtctttcaggaggaggtgatattggagctgaattttaaaggattcatagatgtttatctgaaggactaatgcaacatgttggaggtgagtcttcaggaaagaggcaacaagaaccatttgggtaacaagataggacttggcaagttaggggagtcgtaagtggttcattacggctagaatccagggctctctggagagattgggagtacacagatcactcaagggtttggtatgaactgtcaggctactaagacagaaataacaaaaatcagatgtgggtttagaaagagcattttggctgtaatacagaacatgatggataattgatggagcgagattcctggggagatagaagaggatagggccatgtaagtacatctgctggtattttaaaattagaaaaagaaatttttggtagcaaaatcagaacagacccaccaactctttgcaaatcatgggactagaatgtttggaaaggaagatgctaacgattttcattcatttgtttatcatctatgttgagtgtcttcttgggcctaggcagcatgcccaaagctgggagaataagatactgtatgagatgctagaaagatccccacctctcctttccagaaattcagtatatcagactaattggtttacagttgtgaccatgggcttttggcatagctgttcaacaagatttcattctttttcaaaagcaattcattcatccaccaaatatttgttaaacaaatgtacgttgcattgtagtgggtcctcagggagctggatgtacatgccaaatatgtttcattttatttgaagcaagtccacagacaagtaaactagtcaagtgataccaggcaaagtgatttgctttccaacagatggtgacagattaatttcctaagagactgatctgccccagaggcactgggaaagtcttgttagggaggtagattatagtcaggaccttggaaaattgttgggaataattgaggtcaggaagggtatacttaggtggatggggacagcccctgagcgagggatcagtccttttggagtgagcacggaatattcaggtgcctgggaggagtgaaggcttgtgcttcagcactgattgtgtgcaccgatggtggaacatacctgcctgctcagaagctttggcttctctctgtaggtgagagacagccattagaagtccttgaacagggaagaaacacggtgaaagcaaggatttcattgagaagtccctcatggaagaagaagattacattggaaagagcctggcttagggagggagcagtgacaatcagagaaaaaggcagataggggcaaagatactggaagaagaggaaaaactgtccaaagctttgtccttgtgtgggaaagctggtgctgttggcgtgaaagaggaagcaagaacatgtgcactgacacggctgagagtctccaaaaccattgtctttccttaaaacagtaatgatcacaagcagcttacaactttgcatatagccactggggcaaaatcctattaaaagctaattcattatctgagccagtgcatgataatgcgatgtaaaggcgtgttgggaggcagatgatcagaacttttaagcaaactaaatttcataacatttattagaagcctgtctctatttccagaaaacgcctataaatgtggctgtaatgtaggctacaggtcatcacactgaagtagaagcaatgtacaatacctgaaaggttagagaagttcagggtctgggcttataaaaaacttcattattcatttgaaagatattgttttgtatcccccaattgtggttttcaatgtatataaaagcaggatatcatactttttgatctatggatttggaaggggataatggtgtggtgggcactgagcatatggaattatttaattagagagatgccctttagattactataaaatataaccagaatctcctgtttagacttctaaaatctacttctttgaaaacactactaaaatgaccacaaagacctgtcctcacaagtgggagctattaatcaatagtgtgtacacatggacatagagagcagaataataaacactggagactctgaggggtgggaggggaagagggaggtgagggatgagaaattacttgatgggtacaatctacactattctggtgattgatttctctctgtttcctcttcagaaactgagaggaaatttagtttcctcagtcaccactcctccaaactcctgcgtgggtgatacaagacttgctgtcatcttgaggcagaaggggttaggggatttccccattgaacctgatagccttcatttcatttctgtcttctcagggaaacatttacccctctttactaaatggaagaaggtttgtaaactaggagggtatctatggatctgattgctccttcaccactctgctatatatccatgtaacaaaacagcgcttgtggccggatacagtggctcacacctgtaatcccagcactttgggaggccgaggtggtcggatcacctgaggtcaggagttcgagaccagtctggccaatacggtgaaaccctgtctctactaaaaatacaaaaattagctgggcgtggtggagcattcctgtaatccttagctactcgggaggctgaggcaggagaatcgcttgaacccgggaggccgaggttgcagtgagccgagatcatgccactgcactccagcctgggtgacagagcaagactccatcgtgggaaaacaaacaaacaaaagaacagtgctggtaccccctaaatctataaaattttctaaaaaataaaatgacaataaaggaatgaaaaaggcataggtacaagcagatgggataggacactaaagcaagctggagtaatactggaattctagaaggtagaaggcttagcagagcagttcaggtggaacccacgcctgtgggggcaggggcatgagcagtgagcccatctaactacgggaccccagataggcttgggatctagaagcgacagatgcctctaaaggctgggggtaggctgggactgaaagcagaattggtgtaaagtctttaaaaggagcaattagatccacaaataccttcctagtttctaattattctaccgcttaggagagaggggtaaatgactccctgaaaacagagaaatgaagtgaaggctatcatgttaaatggggacaacacctagcccctccttcctcaagactgacaggaaagctcctacaacccacgaaggagtttggaggggtgttgtctgaggaaactaataagtccaagagaaagaaccttcagaaacggacatttaaaggattaggtccccacccgattaccctagagatacacatacagaaatgtgattggacagtcaaggatcaccgtatgatgcttctaacctgaacaatagacacctagtcacacacccaaacaatcacacacacacatacacacacacacacacttacttcacttctgctggaggaatttacaagatgaagaacatcttgtatctcttttgggctactgtttgtgaaaggaatggttgcatgtgctcttggctaagccaactccatcctgaagacagatttttgtgaggtgggggaaattcgcccagcgttaatagtgttagtggttgtcctgggtccatcctggtctgtattcctgctttttcattttcagatttaaatccagagttattacagatggtaacatctgatgccaatttatggatctttttcataattcacctgctaggaatctcaggtaacctataaaatatgcttttatttggtcattttaagagttacgtttctgaatttcaggtattttatcctgtattgtcagcacattaaattagggaacacattcattgacattctatgtattttcctttgtatttcaaagtcagagtcaagtatttaaaaagataagatctttcattttgtgtgtgatcccacggaatactttctactgtagatttattaaaattctcccacctctggcctctgattaaggaattgcagagtattctctatgacaactcattaaacctattattccccccagggcggtttagtatatcactaaatatacttttagtgatatttgttgattggagcatagcttttgtgtttgccaaacatcattgatgtgttttgaggtcatgtggttgtggggggcagggggtggttgtaaatgtaatagtgtccctctagtattgtaatacttcaaggacatagaatttattttttaaagtcttaaatctttttgtttgtttttctaggaaatcttgagtctatgttctttgatttgagactatagagtttcttggtaaagtctccaattattggttttctgagtaaattcttgagaattggtgaggctcccaggattattgtttgtcatcctgttctaattaatagagaaaaagcatataaatcttagatgtcttagatctgggactattgcatctacttggcttgagccaaagtgtcatctaatttttatccagtaattgtggcaacatattgcttccaaaacaaatcacatttgtaaatgcatattgagcattttctacatgaagggcattaccagggagtgaaagaaatataaggtctgaattttgtcctctgggagagaacattctagtgggagagatgagttgtgaaaagttaaataacaaatatttatagatggtcaatataggaacttgcaaatattattaagattaattacatgtgaaaaattgttattgaattcaaggcaaaagaagtgaacttaaactgagttgcacaggaagaactcataaaaaggtgagcttgtgttggatgagtggatttgggcagataaagaaagacaggagcaaaaataaagaggtggaaaaccacaggggtgtttgatgtatgcagggcacggaaatcagttgtatggtggggggtaccttcaacttaaaacctctgtaccagttagggtgcttgagttgtaagaagccgaaaccaattctggctcatttaggcggagaaagaatttacaatccatgactaggatatatccctccatctatttaatccctgtttaacttttctttattttttatagtttgtatagttttctatgcagaagacttgcacatctttcgttacatttgttcataagtatttgacacttttatgttattattaaagattttctttttttttttttgagacggagtctcactctgtcgcccaggctggagtgcagtggcgcaatctcggctcactgcaagctccgcctcccgggttcacaccattctcctgcctcagcctcccgagtagctgggactacaggcgcctgccaccacttccggctaatttttgtgtgtgtgtttttagtagagacggggtttcaccgtattagccaggatggtcttgatctcctgatttcgtgatccaaccgcctcggcctcccaaagtgctgggattacaggcgcgagccacagcgcccggtcaagagttttaaaaaaatttcagtttctaactgttgacactacatagaaatacaatagatttttgcatattgtccatgtatctgccaaacttgctaatttaacttattaattataataattttatctatggattcttttggattttccaaatatacaacatgccatatatgagtagtgacatttttatttcttcttcctagctccgtaactttattctattttcttgacctactgcattgactaggatcctttactacaatgggaagaaaaagtgatggtgggcattcttttctcactcctgatcgcagggcagcatttaacttttcaccattatgaatgatgtttgctctacagatttctgtagaaccatttatcagattcaggtagttaatcctaacttggctaacagcaattaaaaaaatgaagtaatataaaaattaagaaattaatatgctgctaatgatatgttgttgagtaacataaatataccaatttttctatatctactgagatgatcatatgaatattgttctttatttactatggtgaattgcattcattaattttcttttctttttttttttgagacagagtcttgctctgtcacccaggctggagtgcagtggtgcagtctgagttcactgtaaccttcacctcctgggtccaagtgattctcctgcctcagtctcccgagtagctgggattataggtgtgcaccatcacgcccggctaatttttatatttttagtagagatggggtttccccatgttggccaggctgatcttgaactcctgacgtcaagtgatctgcctgtctcggcctcccaaagtgctgggattacaggtgtgagccactatgcctggctggattcattaattttcaaatgcattttaaaatttctgaactaaatccaacttgattataatatactatctttttttaagggaaaagtagatgaatcagactcagcaaaaataggagccagaatagcaactgatacggtttgtctatattcccacccaaatctcatcttgaattgtaatctccataacccccacttgtctagggagagatctggtgggaggtgatgggatcatggtggcagtttccctcttgctgttctcgtgatagtgaattctcatgagatctgatagttttataagggcctcttcccccttcgctactcactctgtctctcacctgccaccatgtaagacgtgccttggctactcctttgccatctgccataattatctgagatctccccagccatttggaactgtgagtcagttaaacctcttttctttataaattacccagtctcaggcagttcttcatagcagcgtgaaaattaactaatacagcaaccatggcaggggaaggccaagcaccttgactgagtatatccaatgggagaggagatttttttctcacagccaaatcaggacactcacagctttgtgtttaaaagcttgggctctggactcaggctgcctggtttgaagtgccagtcctccctcttatgtggcaggggaccttagctctgagtatccttctctataaaggaggatgatgttctatttacccaataagattctaaggattaaatgatacattaaagtgcacaggtcagatcactctcagcccatagaagtaattataattccagctattattattgttatttgtgaatatgagaaagaagaaagttcactctgacatcctgtaaatggaaaattcaactgaacattgaaaaatgtttaaatctgtctatcagaaagtttttcatcaaaagaaaacactgagtagtctagtgttgtagcttgatccaaaaccttgaataattttcaaactcatttatgatatctgaaatattcaatgacttatacctttgaattttttggcagctttgtggaggtatagctgacatataagaaactgcagatattcaaaatgtacagttttataagttttgatgtatgtatacaaccattaaaccactaccacaataacataaggaacatacctgccccccatccacacatttgatgcgcctccttttaaaattctctttcctaccctccacccctcactgtttaccaaaaagaatgtctgatggtgccctgggcagtcccactctgcctagaaaacaccatagaaaaagacagcaaaagtgctttctcactctggagttctacttgattttaatggacatagattagtgtgaaccacataaaccagtactaaaatacaggatttgatctagaaaaggtgatgctaaaaatgcatgtagataaaacctaatttttttcagacaccaaaatgaaaaattattagtatgccatgacacatgaacacttttatattccacaaccactgtgctctccttttggtgttcatttgcaatggatggaatgtttatgtcccttccaaatttgtatgttgaaatgctaactctcaagatgatggtattaggaggagaggctgttgagaggtgattaggccatgagggtggaaccctcaagaaaaggattagtgccctcagcaaagaggcctaggagagctagcttgctcttcccagcatttagggacacagcaagagggtgccgtctgtgaactagaaagcaggccctcaccagataccaaatttgccaatgccttggccttggacttcccagcctccagaaccatgagaagtaaatttctgttgtttataagccacctagtctatagtgtgttttgttttagcaggctgaatggactaaggcattatttattgtgagttctattcaccatggagcatatgtggcctatgtgtccctggcactgaggcaggaactgagcagagtacgcaggggaattaataatgcttggacctatctttaaaacacctagagtttagtaggaatcaactggaagtagtagggtaaaggaaagtaggtgacttttgttgagccctgccatgtgctagagactgtgctaaagtgatttacccacattatcttatttgaacctcatggcaagcctgtgtggtaggtcctattcctctatttacagatggggaaactgaagctcagagacattaagtaatttgcccaaggttatagaattatcagcaacaaagctgaaagtggcaaagggctctttctagtcaggaggaattaagagagcttgggtgcagtggctcacatctgtaatcctagcattttgggaggccaaggtgggaggatcagttgagcccaggagtttgagatcagcctgggcaacatagtgagacttcgtctgtacagaaaaaaagaaaaaagaaaaaaagagcttgggatcgtgcctcctgtgactcagcatcaccttagtcttggtctgcctccattctgaattgtgccctaaagctagtcattgcttccttcttggtttctgctacaagtttctgcctctcccactggcccatttccggggttcctgttcctgttatgcacatcaatccctagatttctgaggtcccagagggtgggcttctgcttagtccctgtttgtcttcccagggctaggcatcctggtccttagccctggcactggggcttctctccctgctgccttcgaccccccggggctgaccatctgctgctctatccctgcatcctgccagctttcacatcccctgtctcgagctctgcttgccctttactcttgaggggaactccctgcctccacctgttggactggtctggtcccttcactggtcctgccctttctgaccatcttctactctggtctggcctcccattttccagagctcatctgtctccatgtgtgtcctgcttctcagagggtcttgagttccagcttttccaggtctggctggtgccatggccaaaacctgtcccacctctcccattcgagttcctcactagctcctttttgacagttctttcttttttggggtctagctttggccttgctgcatgaatcattaacacataaatatgtgtcttcacaattaattgtttccatttggtgtttgctctagtcaaggaggatggagagggagcaacatcttgtactgaatgtcttgacatcactagaaactagactgcttgtgcttcccgggcatgctgaggtctcaagaataaagagtatccctgaagacattcttatcagtcttcccctggtgaaacattcatcctaatttttccttttagctttgagaccacttttgcatgatttttaatatgtcattaaattaaatagatataattttctctgtctagccaagctgctgttagaagaatctttgcatacaactaatcataaaaaagacattcttcttgcctctttggaaaggagcctgtgtcacctaagagtgaggagtacactcattcttttgtgccttgttcatctgctcaggggattattgattagcagatagaatgtgggtgcaggctgggcgcagtggccatgtctgtaatccagcactttgggaggccgagatgggtggattacttgaggtcaggagtttgagaccagcttgtccaacatatagcgaaacccccgtgtctactaaaaatataaaattagctgggcgtggtggtgcatgcctgtagtcccagctacttgggaagctgaggcaggagaatcgcttgaactccggaggtggaggttgcagtgagctgagatcgcgccactgtacaccagcctaggtgacacagtgagactccatctctcaagaaaaaaaaaaaagaaatgtgggggcagataagttttttggggggtttgcttttaattctttggaagaactgggcttggctggctgggcacctagagcaatgtggatatgggcagctgcttgtcccatggatgccagggacagagtcacaagagagatggttagaaatggtgccaggttctcgctgcctcgtgccaggtcagctcccaacaaagcctttgtacaagacacatataaaccctcagagagtttatgctaacccagtgtcttggccatggcttactcatgatggaaaactgatcatattttattctggccacatggaataatagacatgtaatcactatgagatttgagttgcagggtctttggtttctaataacctttataattttctccctcatcagggagacagaataaggtgtttacattactactttcattttgcaagaataagatcgaggttaaatctacagttatgtcttgatagactgcagcagatttctgcatcagtagaaagtgctgttttcccactaatcagaagaagaaagtgctagccataatgatatgggtccactgtgaagtagaagacaagaaacagagcaggacgtggaattgggagcaatgagaaaaggtgcctagagttgctcttggcaccctgcaccttagatcacccttattaactgcctgctgtttactctgaaaatctttctgtcatttttgagagataaaatctgaaaatgcagtttcttcaagttagaaatgataatttttataatagagtttaagaaagccatgcttcttttctcttctatgagaacatttttatttcaattataaaattgccactataaatagccagtcaagttcatagggcatgagtctcatcaggcggataatttacattatataaaaaaagtatgagttatttaactaaactaaaaaagcaaccagtatcttgtggtcacatactgtatgtgatcccttttacttgcaaggtaaaaagtggtttcataaccttgccaatataattccaaagaactaaggacttagtgatcgttgctaattgaagttattctgtttatgagcaagcaacactatttctttgatgaaaaccagaaaggatttacgtgtcggtaaatagggttcctttatgtttgtgtatgtgtgtgtgtttgtgtgtgtgtgtgtgtgtgtgtgattttatgaggtttgtctcattcttctatgctagtgagtgttgattagttggattgccttttcagttgacctattgctttttaagagcatttttggatatagtcccttaacccagaattaacttctatgataaaaacgctttttgggttgtcagagaggctaataggggatatatgggcagggagttttttaccagccgtcagatctcatcttgcagactgtaactactgtaaccatgccccatgaagggtagtacaaatcatgctattgaaattgagagagatggctgccttttggacaggaagagaactagaagtttttgactttgtgaatctaacctctgcagctgcatcccccagggctgctgtccacataccctgtgctccactccctctcatgatttctctcaccaccgtcattctttgtttctcttgttcctttatcctgaagctctcaacctatgaacctgtgaaaagcccagataacagtaacagattacatttatttatggaacatttattatagatggtgtcattttctaagtactttaaccatattgattcctttaatctttgcaatcatgcagtgaaacaggtgattctcatactcccattttacagttgaggaaactgaggcactgaggggtgaaatgacttgtctgggaccacatagtacgtagtcgagctagtatttggacccagactgtctaactcaagagcccaagttattggccaccatactctatagcacctctaacccagatcaaatatacacagcaccatcacatagtgaaattaatcagtgtcatgtccattccctctgcttaattgtatgtttcttgtgatgaggaacataagccatctccaatgcctggggccacacatagcagatgccctataactatcatcattgtcatcgtcattcttatcttcctcttcctcctcatcataatctactacatataaggcaaatttgtgggtcaggcacacttcacataaattagatttaattctcacaacaatcttacgaaatttgtgttgtccccagtttatagttgaaaagaccttgcatttaggaagtggtaaaatgggaatttgcgaccctgccatttggttccagaatccttcctcctaaccactctataccatatgcttaattaagaaaaaaagaaacaaataggtgagaaaaaacaatgatgtgaagaattttgctgcccccagtattaggattttttttcttcttcttgctagactctagagggcccagatcctgtggagctgtctctctgaagggaagggtcaggctgttcaccctgattttcctggagtcacagataaacttctgccctccaccggatgcctctatcttacacaattattttcctttacaaatttggttgatgacatattcacttgggataattgggttgtccctcctactttgaaactgtgagagagttcactcaatttccaactgcgtatgaagctcttgagtcagatttttttgcctgtaacacctcagctcacaccagtgcagaaatggaagttttaattggctgtaggattgaagggttggtttggtgcatggtggtattttaagaaaggcaaagttttatttaaatgaggaatattctccctgggttttttgagttagctactgggccatgcaacaggcctggctgcttgtgagaaaatgagaagggtgatcaagtacaagaagatgcagccaaagaagtggacacaatccacgtcaagttccatcttctttgtggcagccatgattctgaaggtcactgaagggtatttttccctgagctgtttttggagcctgtgccactggcttcaaatgctgggtcttggccacctcagttgctataaaatatggttatgagtgcttccgcttcccagcatcttgctgacaaagccccacttgtgccttgctcagccccacttcattgctcctgccctctctggggagagggactcaccacctgggtgacaaggttagggcttcttgctgcactttttggcatcttgctgctccctgtataagggcaaagctaaccttttttttttcttttcattgagacagtctcgctctgtcacccaggctggagtgcagtggtgcgatctaggctcactgcagcctctgcctcctgggttcaagtgattctcctgcctcagcctcccgagtagctgggattacaggcttaaaccaccatgccaggctaatttttgtattttagtagagatggggtttcatcatgttggccaggctagtctggaactcctgacctcaaggaatctgcctgcctcggccttccaaagtgctggcattactggcatgaaacaccaccacaactccgaccttcaaaagatttaaaaaaacgtgaaaactgaaatgaagactagatactaatgaaacattggactcattatgactttgttaagtcgttttgattttattaaaatcaaacattaataaagcagactgtgaataaataaattatattctttggccatttcttcattagacaaggatgctatctttcatggctgtgttattgtggggatggctgatagctcatagaaccaatctaacatccacagatttttttcatagttctggactaggtttcttagcataatgcgttgttgtggtcctcatggtctgtgattctctcttgccaaccttgtttcatcagtcccctgttgtcctgcagatttttgaagcattggaatcctagcaacagatttctcatttaagtaggatggtcctgatcactagtctcccacagagagttggtaaaaagttttgttcttcttatcacccacagaacttccctgaaacattttttgttgtgcttgctcagaaaccataagcttagtagaaaaatgcaccttgcttgtgaatacacaatcaggtgtccaaatgagatggtcccctcctagaagataatatttcggaagtcttgcctcagtgggaggtacttggttgtttgtttttgttttttttttcatttcaatagctttaggggtacaagtggcttttggttacatgcatgaattgtatagtgccgaagtctgggattttagtttacccatcactcgagtagtgtactctgtacccagggtccttggattttatgagcttgtttttgtttgcttttatgttaagatatgaataatatgatatgctttggctctgtgtccccactcaagtcttatctcgaattgtaatccccataatctccacacgtcaagggagggacctggtgggaggtgattggatcatggggggcaattcccccatgctgttgtcataatagtgagtgagttatcatgacgtctgatgtttttataagtgtttgaccattccaccttcacacgctgtcactctcacctgccgccatgtaagacatgcctcttccccttctgccataattgtaagtttcctgaggccaccccagccatgtggaactgttgagtcaattaaacctctttcctttataaattacccagtctcgggtatttctttatagcagtgtgaaaacagactagcatataatagaaggctctttacctttttaaacttggaaggccaaattaatactgtcctttccattataagaatcttcagattaaatattttctcattcattgtccctcagatcatatacatttgctttttaactctaagttacatgtaataaactaaacaatgaaattgtattgtggatcataaacttgagttttaaaaagatttttctcctaattttaaaagtaataaaaacaataaatacttactgtattccaggtagtgttcctttttttttttttttttttttttgagatggagtttcactctgtagcccaagctgtagtgtggtggcgtgatcttggctcactgcaacctccacttcccggcctcaagcaattctcctgcctcagcctccttggtagctgggactacaggcacacgccaccaagcctggctaattgttttgtactttagtctctactaaacagggtttccccatgttgcccagggtggtctcgaactcctgagctcaggtgatccacccaccttggcctcctaaagtgctggtattacaggcgtgagccaccgcgcctggcccaggtagtgttctaaggggcatgcttccattaattcatggaattcacaataaccctttgttgcagtaactattattatccccactttacagataggaaagaggtacagtgactggggcagagagaggctctgtgactttgtgcaagcagcaatgtaggcatttgaatttcggcacgctggctcctgagtccattctcctaaaaattgtgctgtatttaatgcagagaatttcaaaaacatgagataaaaaataagagaagaatagcatcaattttcccatcattcaaaggtatctgttaaaaggaaacatttaaaacttagctatatatactttctgaatttgtatgtacatataaacttataaaaaatgaaaatgctaattgttttcacacgtactgtttggtagcctccctttggtatgttcccagaccaaaaattattattcttccccatgatttttttcagctacataatgttctattttatggaagtacatcatttccataattgaatttcttattaagacatattatttgcaaatctgcaacaaatgtgcatgttatttttagacgtatgtttggttatttctttacgatagagtcctagaatcaccggctgaggcaagggagatgcacatttgaagcctctttattcatcttgccaattgtcctcaagaaacattgtttcaagtcccattaatgcaagcaatgaacaaaagtttttatttttctggatactggatgcctctggcttatttttctttctattctgtttctttaatagacaaaacaaaagaaaaagtttctcatatcaatgtgcatttttttgcgatttgcaaaaagttcaaaaattaacaaaatttatctattccttgagtaaatgtatgtggttcaagatgtcaaagaaacaaagtattgtgcagtggaaaatgagtgcaccttcagcacctgcctcccagacatccatcagtaaccctctcaggaggcgaccactgttaccatttccttgactagccttcctagaataattaagcatatacaagcaaagaagggtataagggtacacacacaaataagcatactacatatattgtttttgcccttgtgtttttcacctaacaatatattttggaaattattccatattaataatcaaataatgatattattatttttgatgcctacctactattgcattataagggaattataagggaagggttgcaaatattaacatctgttaattagctttggatatttcttcttttgcaaatacttgccagtgttctttgagcagtcttagaattgtggttttaatgttttgttattgatgatgatttgtaagtctttgctgtgaaataagatgaccgaccattggtattaaatgatgtaaattttatttcacatttcattgttgtcttttcaattttgttttctggtggtaggcttattttgttgttgtttgttttgttttggtgtggctatggaagtctttttgggcaatcaaatctatcaatcattttgatttgatttgtgaatgattttcctggattttcctggatgatcagaggctagtgttgtctctttgtttacttagattcttttgacaagggctttggctattgtgaatagtgctagtatgaacatggatgtgcaaatatctcttcgagaccctgctttcaattattttgggtatatgtccagaagtggaattgttggatcatatggtagttctatttttaaatttctcagaaactgccatactctttctcataacagctgcaccatttcacaatcccaccaacagtgcacaaggattccaatttctccacaccctcaccaatgctcgctattttttgggtgttatttttgacagtagcccatcctaataggcatgaggatcaattgttctgaacataacatttctgtcagggtttttaaaaagtttccaaaatgacatccctccagctccacatattctataagagcaatatcataaattagaagctgtctatgaaaacttgtagttggaagatgtttgttttctgtgggttagttacatttcacatatgcctcatttgtgaaataatttctaatgtgcatgagctggaattcaatgcctgtagtcaaagtaggcttaattttgaattggagttgattaaaatgaaatgactaattagctttatattgacttgggagttgtcccctaaggaaggcattgggacaatgttgatactctgattacctctattcctacctctgttagcttaaaatattagtactgcattcagcacccagcaagaatttctagtatctgaaggcagcaggatacttgcagccattttcaaaccatggaatatggatgattggtagagacttctctatcttgagtcccttctaatatttcatgctttatcttattcataagaaggggcttcactaagtaggactgtcttgtcttgaccactaggggatcaaggttaagtttcttagtcttggtaattgtcagatttctagtctttaaaatagggataatgtcatggagtacctatgtcagagttgcaaggaccaaacgagctaaggcatgaaaagcatttagcaaggtccctggcaagtaagggctaaataaacatggtgtttcttgatgttatgtcttgtaaccattgtaataatctcagtcaatcagatttatatcagggtacaggttcttttctggggaatttttctagcaccaggtattttctgtttatcttctatgtggatggcttttccttatttcttctcattgacaccaagggattccaagtcccattctgattgtgtattgtcaaagtgaaaaacagctgtggccagcagagccatgactataaccattttcaaagtcctgtgtgtaacaaacctcaaggattgatttttcactaagcctttctccttgactgtcaaatgacaagcaagggtatgcagatgataaccccgaacccctttgatcccatttccaaaatatggccatgccatagatgaaggcaaattgttttatttcatcttgttggccccattgtgtatgctctaagttcattttggacttctgtctttactgatagcaatttctatttctttcagacagaagccccttctttcataccttttagttgcatttcttagcattctggccgcagtcttctactacatggtccttatttgtcatctcttccctttcttcctctctccatcccttttttccattattcatccagcaatatttattgagaaccaaccatgtgaggggcagcacactggacattgtcttggcttcctctgtcactgcagatttaatggatcactttagacttatgcctgtattattgccagggttcccctatgtatattgaaacaaatattctctggggatctttccattttctgccactgattttttctttcttttctttttttttgagatagagtcttactagctctgtcacccagcctggagtgcagtggtgcgacctctgctcactgcaacctatgcttcctgggttcaagtgattcttttgcctcagcctcctgagtagctgggattacaggagcgcaccaccatgcctggctaattttttttttttttttttttttttgtatttttagtatatacaggtttttctcatgttggccaggctggtctcaaactcctgacctcaagtgatctacctgcctcggcctcccaaagtgctgggattacaggcgtgagccaccacacctggccattttctgcctcttctgattgggctgtgtatctgagctgtgtcctgggccactgtgccatcccacagctgacaaaatggctctcacctccaggaaactcttacctcagcattttttcctctgtcttgagcttttcttttgttctctgggaatagtcctcttactttcttggagcttctttagttattttttgatcaattttttttacacagttttttgtaacggagcaaaatattttcagaacttgtttctggcatgtgtgtgtctgtctcatctatctgcctgtgtctatgttaaccgttctttgaatctgatgcccaatattctatttgattctgttgattctgaaaatttctttttagtcattggtttagcatttctacctcttctccttaaaccctaggattttctttaaaaagtgttgggactgatgttctgttcttcagattggcgaacatggctcaaagaccactagtgtttaagcagcagcagcttttctatattctgcttgctgtgggcacttgtgatgtcccactgtggctgccatcagcagagatgtggatcctggtggtggctgtgtctgcctcctggccagccagcttcctttatagggaagaaatgcttccgcttcttactggggtgtgagaggcgggcccgtcagtcactgctgctccctagcactcatagcaatgtccattttctatcctttgtgccctgatgataatctttctggtatcataactgtcttctcctccccttccctgtctcctcttcctgctttttttcttcttcctccttctcctcctcactccagtatcaaggcttagcttaaatgtgttgcactataaaggcctcatattttaaaaatataattcattcagtcctcctctatgcctaagcttatttctttgttatggcacttttcatttcatagtatagctctctaccgaggagcgcatacgggataagggcagagtatgagtattttttgagcccaaaaaataatagtcatttttattggtatagcttcaagcatagttcatttacatgatttatgttttaggaaatttcaagtgcagaaaaattgcccagcagttagagatgattgggttatcaatatgctccctgttttttggtgtattttttccagctttattgaggtataacttacaaataacattgtatatgtttaagatgtacaacttgattttttcaaaattaattatttttttgaagtaaattttattgtgtatacttaaggtgtacaacatgacgtgatgagatatatatagataataaaatgattactacagtgaggcaaactaacgtatccatcatctcacgttgttatccaacactaaaatctacgcatggagcaaaaatgcggaatacagtacaatatgattaactatagttctcatgttgtagattaaatctctagacttgttcatcctatatctgctactttatagcctttgatctacatcttctcattttcttcccttcccccaaccctccccataaccactgtgttatgttctatttccgtatatttgacttaataaaagattccatatataaatgagatgatgcaatttttttctgagtctttgtttatttcacttagcacaataacctccaccaggctcatccatgttgtggcaaatggcaagatctcattcgtttttaaggctgaataatattccatttgtccatttgtccatgaattgtcacttaggttgtttccatatcttggctgctgtgaatagtgctgcaatgaacacgggggtgcagatatctttacgaggtggtgatttcattcctttggatatatattcagaagagggttttctggatcacagagtaattctattcttaattttttgagaaaatttcatactgttttccgtaatggctgcagcaatctacactgccaccaacagggtacagggttcccttttctccacacgctcaccaacacttgctatttcttgtctttttggtaatagaagggcagggcatcattaatattgtttcccttacatgtgctgaacaaacacagcagagcagttaccagcgctaactctggaactggcttgctcatgctcatctcttgtccctgccagttcctaactgcggaaacttgggcaagttgcttaacctctctgtgccttcctttgttacttggagctgataaaaataatgcttagaacagttactgccatataaaaagtgctattaagtgtttgctattatgtgttgaattcagcttaatagaatcatcatcaggatcaccagcaatttattgagtgacagtgtgtgttttattcattgatcgtcattacacttagaatagggtcggggatatagcaggcattcaatcaatatttttgagggaatgaattaatgaatgggctagatgttatatgtacaaagaaatatgtctaatttctttccttcaggtctcacagatggttgagaatacaagatggagataagacgaaaattgaatggtgcttaatatgaagcccttcaaggctgcctctttcagaatcatttaggaggcttattaaaattgcagatttgctagccaaactctcctcgatctcagttccatagatctggacgtgggtccaaaactctacagtgccaagaaagctccccaggggcttccggtgaattcccaagaacagccaggactgggatcgcaggccaggcagtaaatgatacaggagatgagaggagggagagctctgggggctgacactgttgggaaggcctggtgagaggggaggtacctgcaagggcatgtagggcttgggcatggggtggacttgatcgtgggggcttagactgcagtagagacattctggtcacatttgcccgcccatgagttccttccgtctcctgatgtgccccagcaatttcatgtgcaaagtacacaagagccatttgttggaaagtacctaaatcactctatttactgagtgctttacttgcacttataaatctaaaacaaattttcaagcaaataaacaagtgtgtggatatggagcagaaataccactcatggcatcctgaacttggccctctgactcagtaattagtatcctaaaactgagttcaagcatcacattttattttcaggttttacatacttcatagaacttggtctctgatgttacagagatcacagtaacagtttaccttatctccagaatttctaacttctcaatggtggcatctctcattagaacaggtagtcaccaaatagttccacacaaagactctcccaatgtgtcatttattaaaacaaacaaacagatttgatatacaattaatataccacaaaatcacccatctaaaatgtacagtctggtagtttttaacatattcagaattctgcagctttcaccacgaattaatcgtagagtattttcatcaccccagagccacccctccctacctttagtcacttcccatttccccggcccctgataatcactcatctgctttctgtctctgtggagtactattctggaaatttcatataaatggaatgatacaacatgtggccttttgtgactgacttcttttacttagcatactgttttcgaggttcatctatattgcagcatgtgtcagcacctcatttctttttgtgctgaacactattctactatataaatatacttcattttctttatccactcattagcttgtacacaactggatttccactttttggctatgtgcaaagtttctgtatgcatgcatgttctcatttctcttgggtacccacttaggactggaattcctgggacatgtgctaactgtatttatctaactttttgagaaatcttcaaaatggttcccaaagcagctgcactattttatatgcctaccagcaatgcatgagggttcaatttctccacatcctcaccgacatttgttattgtctttgattatagccatcccagtgtgtgtgaagtagtatcttgttatagttttgatttgcatttccctaatgataaatgacataaagcatcttttcaggcatattggccatttgcatatcttccttgagaaaatgtatgttcaatttttttccatttaaaaatttgatgattttaaattttattgttgagttgtaaggattcgttatatattctggatagtagacccttatcaaatatatgatttgtaaatattttctcccattttgtgaatcttttcactttcttgatagtgtccttggatgcacaaaagtttttagttgtgttgaaaaacagtttgtatatcttttcctttggttatttgtgctttatgtgcatatctaagaaactgtttctaatcctgggtcaggagacttacaactctgttttcctctaagagttttatagtttcagctcttatatttaggtctgattcatttagaattaatgacttgtatatggtgtgaggtagaggttcaaatctattcttctgcatgtggctatccagttgtccgagcactaaatgtttagtccattttcatccttccattttgtcttgtccaggctgttgaagtagcctcctcacagctctccctgctcttagctcttctccaccagagtccatctcccaccatactaccagttattcatcttatacacagatatgattatgtcctttccttaataaaaaaactttattctttccttagtttctataaaatagttcaaatattcaacataaaattccaggtcctatctagcatgacctcaacccacctcctaattttactgtgttccttctccccacttgctaccccatcccagccatccttgacttcttagctggtctctttctggcctgagtgagacatttggcctggatatatatgcatggtatggctttggttgcttactgtggcattggtgcttatgggatagccattgactttaattaatggggtgttatcagcacatttatcctattgaaatgactagaggaacccataagaaaccacattttcaggactagtaatctattttagcatcatttggaagacaacaaactttcattttatgggtagactaacattcacaaattatgacatatatcatataatcataatcattaagttatattttaaataatcaaccatccaccatcccaaactctaagactttgttggtaagttttgtatgtcacaggttcatatttttcacattctgacacctacattcaaggcctcaaactttaccagagactttttatcattgaggtaaaactagaagtcattaatttaaaaaattatattatttttaattatggtaaaaacataaaatatacattttaccatcttgattttttaaagcagtttactagtgttaagtatattcaacagatctccagagcttttcatcttgtaaaactgaaactgtaacccatttaccaacaactccttccccatttccttctcctcccaaggcctggcaaccaccattattctttctgtttctgtgaattttactactttagatacctcatataaatggagtcatatggtatttagcacaaggtcctcaaggttcatccatgttgcagcacatgacagggttttcttccttttcagggctgaataatactccattttgtctctatatcacatttttttgtttatccattgctctgttggtagacatttgtgttgcttccacttcttggctgttgtaaataatgctgctgtgaacacaggtgtgcaaatctctttgaggactctgctttcagttctttgggatatatacacagaagtgtatataggattaggattgcaggatcagatgataattattgttttaatttttcaacttatcttctcgaatgagaacactaaattaaatttgtggggtttgtgtcattttagacatagctcacgaagaagatggtaactttaaattgtccctgcaacaatgatgatgggcttcagtgattgtcttaaatgagtcatcattatttttgtgttttataaccaaccctatgcatctgaacacaaaagtcaaacctttttaatacctcaggtgtattttacaccaaaatacagggaaaaggcatcaatcaaagctgcttaacagctgatatgatagtgattacatgtgatatggtagttgagactgaaatgctatttgtaatacaaagattatcttaactgagtctgatttgaggtgaaaaaaggtactaattagggtgacaatatgaatttgatttaactttaaagtattatgagagaaaacatactatgtcacaactcttttgtataacgaactgggatttaggtatggagtgggtagaatagtggtcaagagcagggattctggagtcaagtgtttggcaccaatcctggctctggccattgccagctgcatgagtgccactgggcaagcttctcacagcaccagatttttcatctgtaaaatacggttaataatggattgtggtggcattacatgaattaatatacgcaacatgccggaatgacatctggcagggaggaaaagccatataagattttgtaattgattttctagcacaagctatccattcttaggttgttgtatcttccttgtgtcatcccacatatcaatattgtcatctgcaaaaaatatacacgtatgtctcttttaactaatgattttaaaatgtggactaatcaatgatctaaaatcccccttccttttagtcaattagtagttcataaattgaagatgtgatggatagaacatttcgtacccagaaagctcttagattgtaaatgctgagggaacactgggagattcagtgagtgcagcacaaatacaatctaggtgactggaatagtttctaatgaatgaatcactgaataagcagatgggttgtggaaggcaaaccatgagtaaattttttcttttactacagaaatatttctgaaaggtaaatacccaggtttatgatgatagaccttctttaaactcatgctatttttctttctgggttttgttgtcaacacaatctcatctgctctttgcaaccattacctctcagaatgggtatgaagatcaggtgcaaccatgtatgtgataatgcttctaaaagctattttttttccagttttattgaaatatattttgcataaaaatataaaatccacccatttaaagtacaaagctcagtggttttcagtacattcacagagttgtgcgatcattgccacaattaattcctttctgtctccatggaatctaattttgaacattttatataaatagaacaatacaatatgcagtcttttgtgtctggcttatttcatttagtatagtgttttcaagggtcatttatattgcagcatgtatcagtacttcattctttttattgccaaataagacttcattgtatggatatgtactacattttattttctcattcatgagttgatgaacatttgggtttccacttttggctattacaaataaaattgctatgaacgtttgtgtgtgagtttttgtgtggacacacatctttaattctcttgagtatatgcctaatagagaaatttctgagtcatatggtaaccctatatttagcacttccaggaactgccaaatggctgtacgattttacattccaaccagcaatgtgtgagggctccaatttccctacactgtcatgtacacttgctattatctgttttgtcataatgggtatgaagtggtaaaactactgaaaaaagtgacatattcatggagtaaaagtaaaattgaaacatgcagaaagtattcttcaggcccagacagccccccagaattacagttttttttctagagtccttgaaagttgtctatgcacatatgacgtatccctagatatgtatttgcaagaacacatgtaggagtatactattttgtatcattctttatcacttaataatatacctaagagcaattgctatagaacaggttgacctgcctcattctttttactcttagcagagtattttttgtgacgatgtaccttcgttcgttttaacagcttttctaatgaagggcattttggttggttttgctcttataagtaatgccatgcgcatccacaagacatacaattgttcttgagtacatttgtgaagatattcacaggaaaaaacaagttatactgctatataccaccatcaacaggggatgagagtgcctattagcccacagtctttccagcttaacactgtgtgttatcagcctttcccatcttggccaatgtggtaggtaaaaaatagttcagtaaaagttgatttgacctataaggggcaaatcaagtttatgttataaagcttgaagttcaacattgaagttgaactccagataatatggttaaagctttcaaatttctgagaaatatgcaggcatagagattgtgtctaaatttgccttaatacatagtatatccatttgctaattgaagaaggtgattggttcatttatttattcaactggcatttattcagcatttatcgtatgctaggtgaactttaagtgctagagagaaggatgaataagaaacacacattgcttacaagtaatatatagtctaataagggggacatatatatataaatcaataagcataatggacatgaaatagaggcaagtattatacaataagctgtgtatattaggccataggctaagctactgtgaaaaaaaaggaccctcaaatacttgggaaattgcttttgggaaaagacaaaaaaaaaaaaaagcttgtggaaaagggtgaaaagtggacatgagagtaaggagagtaagccatttttaaaataaaattttattttaacttcgattgtcatatggtaagtgtacatattcatgggataaaaatgaaaggttttgacacatgtgtgcattgtgtaatgatgaaatcagagtaattagcaaatccatcatctcaaacatttatcatttctttgtggtaaagcattcaaaatcctctcttctagttagtttgaaatatacgatgcattattgttagccacagtcaccctgctgtgcaatggaacaccagaactgattcctctcacctaactgcaactttgtaccagttgatcaacctctccccatagccatttcctcttaagcaagaaacatggaaattgtacacattacttctgaaaatacactggcaagccacttctagttgcagggtagacttggaaaatgaagtctaactgggtgaccctgtgcctccacattattctggaggaaggggatcacggagctagggtccccagtctgggaggctggtagagaggcagctcgctgtgctactctgatatttttagctccgtgggggaaaaagaactgctagacagagctctgtcaacacagatctgacaatctcattcagaaacaagttacagagacctcaagtgattaataaacaagattattctatagaacatcttatggtgacataatcaatatgatttcaacactcagctaataaatgctatgaaatacaatttatgtaaggtgttaattgacatgtcaggttttaaatacaaaaggaatgagggagggagacatgaatatagatgggtgttatcagagaatgacacttagatacatttcatattgtgtcatgtaaactaatacctactttttgggatatttcttcatggtttagtttttaatgtagattcaagagttttatatattcaaactcttcatgaaaaaaattcagctctggttatgtacatccacatttacaggaattgaatttttctttttgtacacttgtgagtatattttttcctatggcaaacgttttccagaaagcaaaagttatttgtgttactgtccctgataatcgatgctgtgtaataaatcgttctcagcaatggcagtttggacactgatggacagttggtgactggtaatttgtacagtatgtttagtgggacggcgggcaagggggaaaagtggcatttggttcctcagtcccagatttgggtcaatgttctcataatactggtgagcaaggagcctaattctttaggaattttaaaaggtttcttttagtgaagaacatttcccaggtgtctaatgaaaaattataaatgaccaggtataattttgccaagctttccaacatagttttcctttagggtgagaaacaatcctttgattttcttgaagtagaagtctcttctcgaatgctaacagtaaaacaagaccttttcagacagattttgtattttgccatcaaatgtgcaatttttgaagatacgggacttgagaatcaggtaaacttcgttctgaaaaccaggcttaattttatgactgtgattagaaagttgaaaaaaaaatcacgttctcacaaatgaaaacaaaagtcagagttcaaactgtttatcctgtttctgtaagcttttgtttcagaaggccaaggattatttgaggagaacctggaaaattaactcaaatggaggaaaaaaatggcgtttatgcaaaatgcagcaaaagcagacagccttggagaactgaagcttaaatagcgtaagagtctgagtactagtcttcagatacttaaaacagcatttgatagacaagttagatatttaaggaaacatttaatcagcttggcatcagcattagtggcttcaatttttggctgagcctgactttgccatatgatcctagacaaatttgcctaaaatgggtgatattaacttctttagggaaaggctctgtactgggatttttttgaggcctatgatttatggggtcaagctataaaacaggaggaaacacatgctcatttgtataatttttacatatatttggtccataattgtacagctaggcaattcatttattatctgtttgagagtaaaagtttgattattttaatgttactacttctggttttttctcttctcacatgttcccagtgactcctttctgataacccaacttatcatcatagaacgcatgtaatgctgagaataagacacagggtcttggaaaatgaatgacagcaatggtgctccgatggcagttttgtcagactttgaatggtttatgaaatcactgttgataaaagtgaacaccttctactgaagggagaaatttaggggggaaaaatcccaaatagaaggagttaatatccaaacctggagacttacctggtaaggttcacttaactggtaaaatgtgatccaatttaaacaaagtatttttagttttctcagaacaaacatcctacataaacacaaaaaatgatatgagacatagatataacttggttcacaatattttccaaaactataatgtaccagccagttggtacagcacaccaggagagaagatcattattaatgtgctaatagcagcattttattttgaaacccactctgcatggttacagggctcaaaacaacatattctaacaggaagatacattaccgaaatattttaatgagaatatttaatatgcattgagaggtccgcattttcttgcagagaccttgtaggtagctctttgagatttctgtctctatgcatttaagtgaaggagttggttgggtattttagttggcaaattttgcagacatgtagctttggtagtggagaggtaatagtaccatgccctgcgtgctggcgaggaagccccacagcaacagtggcttttagcagctaccagatttgctaaaagcagccatgtccaattagcagtaagtgccatgcacctgcagttactaggaattgaacctcttttgaggctgaatcttaatgtagccttttaaaaaaatagcaaaaatcttactcatactctgagataataaagaaaaattagcaatggcaaaatggacgcactctgaaatgtattcttaataatgatttagaatatggggtaaatgtagaggcaatgacacatttaaactgcattatttttaaatactgttttatcagtttacttcctaattttgaattcaattttcatatctatactgcaactgctttttttttttttttttagaaatctataatattgctgcaggctccctatgtatgtttccataattttctgcaaagtgttttcaccagaataaaaaaaaattacagttcaaaattgcaaaactgtagaaaaaatatgctctttgacttcttttctatgtgtcaaattcaccacaatggaaaggactacactatagaattaaaacgttattttcaacagatagtacttattttaacatgtgttcagcatttaaaaatatttaatattcttttctaaaaatgcttacattcagaaactatttatgagggttctgagcagtatgatgtttctttctctgatttactgctttttctcttttagaggatattgtaggagaaaaacatttgttaagcaatttccagaactactaggttctaataagaccaataggctaataattcatttcattgcaactggagtgtgtacttttcctttattctcagtcataattttttaaaagagccaagaacaccaaatcatcaaatctaatgttgaacatgtagtaacttttatttgctgatcatactctgagattcaccataacgaataaatcataagtattaaaatttcagctttttaacatacccactacactgctagcctggtaacacagtcaccaactacacagcttcttcaactgttgacgtgctttaaagctaggattatggtatcctgccaaaaagatcctacaaactgtcactattttggtttgtcctgccagccattgagaagtagacaatttctatatacacaaaccagtttggaaaatttatgcaaataggaagttattctcaaaatgggttatttgattgcatttttttttttttttttgagacaaggtctgactctcgcccaggctggagtgcagtggcgtgatcttggctcactgcaacctccacctccgtggttcaagcgattctcctgcctcaatctcctgagtagctgggaatacaggtgcatgccaccactcctggctaatttttgtatttttagtagaggcaaggtttcaccgtgttgactagggtggtctcaaactcctggcctcaagtgatccacccacgttggcctcccaaagtgctgggattacaggcataagccaccgtgcccagcctgattgtgttttaatgtattggctcccaaccagtagcaacagtttgggtgcacagatattgccgtagtgtttctattcaatgtgtcaaattatttaggtaaaagtttggcttaactttgttgacatggaatttctatatcctccagtttctggtttaactggtttatgtggaaatgaatggaaacacatggttaagttccccagcctccagcttctctcttcctcttacctatatttgtacttgcccacttttcctcttgtgggcctgttcctagaatccattatgttctgtgggtgacatcagcctgctactgcgggaagaaatagaattttatggtgcccaagataaaatcgactatgatgatgcagaatgaagacctggagaggagtcagagattgcaggggataaaaagagagaaatcagagatgctcccacaaacagagaaaaccttcagaagcagcaggaaggacagagtaaatggagaacaaaaactcaagtcaaaatagtcaatggaaataaacagttttgaattccagttataatttggaaaagaagcaaacgtttattttaaattaagaaaaaagtcgcttataatttcctgaagtttagaaaagtgaaaaatagttaaacctcctgttgttagctaagaagtgtctattattataagtttgtcgctggagagaacataaaaatctctatctattgctatttttttttttttttgcataagggatagataaaagagtgtttattttatttagcctttggcctgtaaagtaagatttatgaaacaaaggacaatcggaaatgataagaattttttcctaatttctaattatttagctaaaccttgattgatttctctcaggctagtgcccatattacagcagcagtcagccttcatttatcttacctgggaccactgctaaatccgatgtcacttttcagtttttatattatgtgaccatttagccacatttcacctacttgatcattccctccatcttgagacctccctcgacccggcttccaacatactttgccctcctggtttttctttctctgttggctcactttctcagtctcctctgctggttgctccatttttccacaatctctcaaaactggtgctcctcagattaagtccttggacttctctccttagattgacatctggagtcatggcttcaaacaccacctatcactccctttctccttgaactctagacgtgtccatccaactgctacgtgacatctccactgggatttctaagaactttgccaaacttaacatgtctaaaaccaaattctgggctgggggtggtggctcacgcctgtaatcccagcactttaggaggctgaggtgggcagactacttgagcccaggagttcgagaccagtctggccaatagagaaaagctgtctctacaaaaaatacaacacttagctggacgtgatggtgcatgcctgtagtcccagttactggggaggctgaggcgggaggattgcttgagcctgagaagttgattctgcagtaagctatgattacaccactacattccagcctgggtgacagagtgagaccctgcctcaaaaaaaaaaaacaaaaaccaaaaccaaaaccaaaaaaaaaaagcaaagagcaaaacacaaaaaacatattccaaatctcccctttaaacctcctcttcttacaatgagtcctatcttgatttatggcagatccttccttccagttctcaagccaaacaccatggggtcattcttgactcctctcttccatgggctcatctaaacatcagagtatcctgttggctatctggaatttaaccacttcctatcactgccattgctacccacctgctcttagttatcaccagagttccctggagtgttggagccgccgcagagctggtttccctgctcctgcctttcctgcccatgctctgtcctgccagtcagctctgtcctttaaaaatggaaatcaggttacctcatgactcttttctttctttttcttttctttttttttttacagaatcttgctctgtcatccagcctggagagcagtggcatgatctctactcactgcaacttccgcctcccagattcaagtgattctcctgtctcagcctcttaagtagctgggattataggtgccagccaccatgcccagctactttttgtatttttagtagcgaaggggtttcgccatgttggccaggctggtcttgaactcctgacctcaggtgatctgcccgcttcagcctcccgaagtgctgggattacaggtgtgagccaccgcgcccagccatgactcttttcaaaaactccccatcttctccacttccattcagtaacagtcagatctgcatggccccctcctgaccttctgatgtcatgttctttgctaccccttgagtgcattgaacatgcctctgacccagaacttttctgtttgctatttcctcaagtgcatatcttgttccttcattttcttcaggtgattattaaaatttcacttccatgagtccttccctggcccccatatttaacactgcatcttcctccatcttctttccctcctccccatgtacattttactcccttactaaattttttttcctatctcactttcttttctttttgagacagagtattactctgtcacttaggctggagcgcagtggcgcaatcttggctcactgcaacctccacctcctgggttcaagcaattctcctgcctcggcctcccgagtagctgggattacaggcgcgtgccaccatgcctggctaatttttgtatttttagtagagacagggtttcatcacgttggtcgggctggtctccaactcctgaccttggcttcccaaagtgctggtattactttctaacctcctgtgtatgctacctatttatttgtctgtctctctacactagaatataagctgctatgagggtagacttctttgttttgtccaatgctctatttccaatatttataaccgtactggccggtaggtactgtcaattatagtttttgaataaattgagagtaacaaattctaactggtgaaaataaattaaatgggccgggcgtgatggctcacgcctgtaatcccagcactttgggaggccgaggcgggcagatcacttgaggtcaggagttcaagaccagcctgggcaacatggtgaaaccccgtctctattaaaaatacaaaaattagctgggtgtggtggtgcatgcctgtaatcccagctactcgggaggctgaggcacaagaatcgcttgaaccctggaggcgaaggttgcagtgagccggcattgagccactgcactccagcctgggcgacagagcgagactctgtctcaaaataaataaataaaataaaaattaaaaagaaaataaatgatctcacaggatatcatttcttgattggaggaggagagaaaaatgtgtatgtgtgagggtacagagagagttcctttgcattagtgagggttcacatcagaactgtctaacctccctactcagtgggtcctgttacctctctcctgaatccaataatactctggtgcacaccttttactggtactgaggctattttaacgttccattaaaaaaaaaagaaaacatttaaaatacaaaaacaaggctgtactactttaactctgaccttagaagactctcagttttataactgtttagagaaaatgtggaaatgtttgctggccccaatctttttattactcatctctataaagaggcttttaaggacatattaaaaagtttccatctctcttgtctcttgcctttcttctcatcttcctttcttgtaccccaaatggctgaaagcaagaccctgagagtctggaagaaatatattctggtcagagcagactgagctggagctggcctagaaccttggatcctgacctcagaattgctgctcaaattactgctctctgaaagagtgagctcatgcatgtttattattactgtgaacaaatttagctgttgtttcacccaaacattgaagttctcgcttggacccctttgcttgtttgtgcttttgcaaatgtgttttctcatgtgctactagaaccaagatgaaagcttcagttctcagaacaggtgccacgaccgaggagacaaaacaagagctatagaggggtgtggtgtgtgaaactgagaaagcaggtagtttttcagaaaaactgagagccaggaatgacttcatccatttcctgtaataaggcaatggtctgaccttgaggaacctattagagtgtgcttctaaacagaggccatttcgaggctgaatgtacgggagtatttacctttgactgttttctgaagcaaggtattttataaactgtaaagtggcttatacaattttaggaatggaaagttttgcaaagtctccaaaatccctgggagttttgaatgtgcaggccatatgaattctttgtagtttcatggtcttgctgttcagcattctttagagtcacctgcatggtagaagtttagtaggaatttgggtagttatgggctggtttctttgttttcccaaatagaggtagcaaaatggatgctaagaagcaaattacttttactattttagatgcctctggggacatcctgtcataatgcaacttaaaatatactcgtctcctcagttcctttttatgtatttatttaatagtcttcaaccaatttgttcttcattagctgttctacaatacttcaagagaagtcatgataatgatgcatttaggatcagaaaaatatagcatgtgtgagttcctggggactttagagaatatctagcccagtctttcattttatagaagaggaaggccagggatggtggctcatgcctgtaatcccagcactttgggaggccaaagtgggcggatcacctgaggtcaggagttcgagaccagcctggccaacatggtgaaaccgcatctctactaaaactacaaaaattaggcaggcctggtggtgggtgcctgtaatcccagctactcaggaggctgaggcaggagaattgcttgaaccaggcagaggttgcagtgagccaatatcatgccactgcactccagcctgggcaacagagtgagactctgtctcaaattaaaaaaaaaaaaaaaagaagaaggagaggaagctgggggtgaggacaggcagtgactcacccagggtctcacactgatttgctggcagagttaagcatgaaaaggtgcctctcctagtctctttccagtgttcttgtcatcacaatgagttaaaataaaaattactagcaacttgggagtaataacaataaacttctcaaaatctactacatggtctagaaaaccaaacataaggccggacgcagtggctcacgcctgtaatcccagcactttgggaggccaaggcaggcggatcaggaggtcaagagatcaagacaatcctggccaacatggtgacactctgtctctactaaaaccacagaaattagctgggtgtggtggtgcgtgcctgtagtcccagctactcaagaggctgaggcaggagaattgcttgaacacgggaggcagaggttgcagtgagccgagatcatgccactgcactccagcatggcgactggactctgtctccaaaaaaaaaaaaaaaagaaagacacccaaacataaaaccagaatattcctgtgagttccattacataggacaatatggtcctgctgatctattaaaattatgtttataaattagaggctcttcattgggagatatacttaatgctagatgacgagttagtgggtgcagcgcaccagcatggcacatgtatacatatgtaactaacctgcacattgtgcacatgtaccctaaaacttaaagtataataataataataataaaaaaagaataacaggaaaaataattagaggctctttactgtatttaaggtgttcaaataattgaagctaggttagtatctccttagcctttccccagcatgccctgcagctttgacgctgcagaacaccagttggtggctgatatttagatgatggaaatacttggacacattttgcatttttgataaaatgacatggcactgatggttacattttacaaatatttttgcggatgtatatacaggtggcatacccaagaaggaacagaccttcctcaggggtccttcttaggaaagtacagctttgcttctctgatcatcagaattggatccttcaggtattaggttggtgcaaaagtaactgcggtttttgccattcaaagtaatggcacctgaaagggttggtaaaattcagaatattataaaatcagtaaaagcttaatcaaatttgcctaaatctatcctacagattagtctatgcatggtttattaaacaacctaactgaaacacacatgcatatgtgtgagtaagctgacatcagggatcaccttatcatggaaaatctagggaaggttggctcaatcttcaatttgtgaagaccaattcccctaccacgtccatatatacatattcccaggagacttgtttcttcagggctctctttggttctcagctcttcctttctgaattagtgggtcactttaacctcccttgggtcacagtcgtgttccacactgggtgggtccagaggtagaactcattgcctttctttgaatcccacacaagaccacccaacaaggcattgtagttggtggaaaactccattgaagaaagggtctatattgcaacaaacaagcatctagaaatagaatattaaatatccctcctcttaaaaatccattgtccaattcagacttcagcataatgtaatcttctgtcttcttttctctgtgtttccatcttgagagccatcctattatctgtgtcctttctttgttgtcttaggaagaatattttggcttatcctttgttttgttctctccttcccggacctattatggtaaatgtggaatttgcagataggcttatttgcgctccccagcctgctcccttaatgctctctggtaagacacttctttgagtcctccgaggcgagttgctgccccccagcacctgctcttccccatcgcaacccatgacagtaaacgcactgcacatacttatcccacagactgctgtgagaactagatggaggctatgtgtgaagctgcaagctcttggtaaagtgctacagaaattggtagacactgttactatgataagatgttcagaaaataatggatcgattaaagtttcacttatctattaaaagataaaaaactctatgattgagacctttttggaatattggaaaatatttttgtgtgcttattagcatactgatatgtttcagtacacatttcatggatttatggctaaggatgttactttcaagaaggtaactatacatcgctctctactagcatgctgttctgttcctgagaaatagtggctgggcgaagggtatgcaaacatttcttaatatctcatccaataccattttcccactactaattattcaacacatggaaatgtaggtcaaagcattaaaaaaaaaaactagaacagcaataccttggtggttggcaggtgtttatttaaaatatttacgttttagccttattttttaatacttctttttcatatatattagatatttaactaaagaaaataataatcattctcatggaatactttaaaatagtagaaacaatcatgaatagaaatgaagatttaggcctatactaccctaggctctgtcattcttattcctaaccatttgcataggaaatttagattcacccacttctctttcttagaataagattcacaggtttttgggcatattcccattgcatgcctgactggggaggtgttcaaatccctgcttttctactcctcagccctgtgaccctgagcaatttctgtggcttggtttcctcatctgtaaaataggatattaatagaacatatccctttaacgttgcagtgatcacattaattagttgatgcaaaacagtccatctagaacagtaagccctcaataaatgctagctatcattatcatttcatagccagccccaccatggatgggtcatgtgacctgaagcaaatttaaattctctggatttcagttatctctcattgaaggaattaggctccatcagtggttctcaaactcaagtgagtatcagaatcacagggagggtgtgttatgacactgaaggccgggccccaccctcagaatttcttattcagtagatccaggagggagtgcaataatttgtatttctaaaaagctcccaagtgaagttgatggctgatctggagacacaccttgaaattcttctgcttactctaaacaaaacgtgcttttttatcttgagtgcacatcagaaccctctggggaggttaaaagtcccagtgaaatcacaacctctgcagatggtaaccagatcttagtggcttttaaagttctccaggtgcttccattgagcagctaaggttgacaacacttctaacaccgctttcaggtgaaaaagaactatcattctaacttaaatgaaggagaaaatgaattcatcattctgacaccgttatctattctttcatgcatgggcttatcctatgagaaataaacatttactaaggtgtatgcatgtttttagaacatccattgggaagcatgttgtacagcttgtagtaaaacagcatggtgcatgctgaaactgttataggctttgcaagttattttttataaattagttttgctggtgtgctgtttgattattggagagtggtgtgaacatgtttctatgcatcccagggggttgctgtcacctttaaggggcctctttaaatcccagctctttcatttacaaattctatgaccttggatgagtttcttcacttttctgtgccacaagttctcagtaaaatggagataattatagaacttacttcatagagctttgagaatcatacaggtaaagttattttacgtaattagcactcaaaagtgaccattaataatctaacgttttaaaatatattaataggccagatgcagtggctcacacctgtaatttcagcactttgggaggctgaagtgggtggatcacttgaggtcaggggttcaaagccagcctggccaacatggcgaaactccgtccctactaaaactgtaaaaattagctgggcatagtggcgtgtgtctgtagtcccagctattcaggaggctgaggcaggaaaatcgcagtgagccgagatcacgccactgcactctagcctgggtgacagagtgggactccatctcaaaaacaaacaaacaaacaaaaattaatagtttaaatatttttaatatatttcaatatataaagatgtaatttttattttaaatatattaaaatagataagtttaaaatacataaagtaaatatataaaattaatatgttaaaatgtttactgaaagtttacatttttctctgtattgctaagagcaatttattgccttatatgttgtgtaatatctagaaaacacacctatgtaatttccaaattataaccaccttggctcctggacaagtaggactgtgtctgatttttttttttgcatccttgtcactacctgccactctgagatcacttgttgtctttccatatataatcacctctaggtacacttctttcattatttctacgcatcctctccactttgctgcattcttgtgtgcattcttttctcccacgttggaaagaaatatgcatattgagcgattccaacccccaaaggcaaaaattactagccagtgttgaaaatgaaagcaaggaattttttggttattgttgctgtaactttttgatgtgcgtacatatgtgcgtcttttttttccccctaggggtggaatggggtggtgttagtcagggattactgacaggacggtgttgcctactgtgttggagagactaagactggggaaagattctccaaggctgggaaatgcagacgtccagtcttggaaaacagtttgtcgttggtcgttatgtcagaagaggagtgtattcctggaagaaggcccacaaaatatacccagagcccaggtgcctttctaagacgaatcaacattcactcacaagttcagctaatatatgacagaaatacaagaatgaacaagactcctgacttaagcttacagctgatgggaaacttgggaactggacagagaattaaaatacaacgtggttaggtacaacttacctgcgccagaggagtgacggaaggccttggacggggagtgatgcctggaggatgacagggcgacaggtaagttagggggctgggaaggggaagggcggccctgtgggtaaagggaaggaggttaaagtcagcagggaaacaggcagttccctgttgctggagcaaagcgcgggggtgtggctctcctgtctctggctttgctgtcaacaggcgagattggcaagtagggcgaccaaccggcctggtttgctcgggaccggggtttcctggaaggtgggactttcaatgctaaaactgggacagtcctgggcaaacaaatcagtacggttggccaccctatctttgtgtgggcatctgctaactgagtcatgggcctgtctggtttatttatttattttttttctgcctgagtaacagaagaatgtgttaaacatatggagtatggaagaagaaggagaggggagataggatttttatgttatagattggaagaagacatccttgatgaaggagatgtttttactttggagaaggactgcctcagccgcgaaagaccaaggggtggcaccacagggagaagtctgcactgcgcttgtcaggacggccagtggggggctgctgagcgcagggagtcagtcctcgcaatgaagatatagtctcggggagataatgctggaaatcgatggaagaagtggaacaggacacaaatttagtggaatttctttacaatgtgtgcttcttgtcaccagttcgttaaccatgataaaaacggttatgttgttacattcatcaagatccaaattttctaccattttaagatgtctatcagtcacaatgatgatcactgaagaccgaacgagatcatttcctctaaaaattatgttacatttatccataatggcatcagtgtctgttacacgtttgctttaattttgaggtcaaatacgacatttgtaaatctagcacttcatgtgattctgtaagcactaaacagctaaacatatttacttcttttttttgaatcaattagaacagtgctgtacaatagaaaaatagaacagtgctgtacaatggaaacagtgctgtacaacagaaatctgtcagccacacgtgtcgtttaaacttttctagtaatcacattaaaattgtaaaaagaagccaataaaagtaattttaataatatattttgtttgacataatatagctaaatatcaattttgacatgttctaaatataacaattattaatgaaaaatattacattcttttggctttgtactaaacatttgaaatgtggtgtacgtttttcacttatagcacacgcaattcagatgctacatttttattaggaatatttaatctgtagatagatatcgtaaaatttacatttgaaaaaaatagattcagacacctaagttgttacaagcatacttaaaagttttcaatgactgaattgagtatcagttttaaaatttaaatcaatgaaattaattaaaatgaaatgaaaatttagaaactattcctcagtcacgctggctacatttcaagtgcttcatagccacatgaaagctgtattggacagcaaagaagtagaatatatttggaataaaaattttaaagtggacacattgtgttactctcgttagccatgctattgctattttttttcctatagctaattaaaaccttaagatccagtaggttctccacctttttttaaagcattagttccatgtcgaccctgtagatggcagcactttcttcctaaaactacatggaggagttgcctgggcttgtcactcagattctggcacttttcatagaaagagtctgaattatctggaaaattctttggtaacataggtcagaatcttttcagctctattgttattctgcacagatggctgttgcttatgaaaacaatctctcagcctctagtccaggatattactcattcctcagttcaagaaactctagggtgagaggagaaaggggttcaattacagaactgttatcaaaatgcgttggtttatgcacatccgtgttttggacatggtgattccaagagactcttaataaaacttttcaaagtagatgagagacagtttttccctcacatgctgtggcaatattaatctatgttttcatgttccactggactttgtaattgaattttaaggaatgcatacagggcttcatatttatatataaaatatccatatccagtgttgaaagaaattaacaataaaatatgtacctgtataaaatttgtgatttttgaagcacccctctcttcctcttcgcattgcatttgtggtaggagaacatgagacaaggaacgaggtactaaggacaaagaaggagcgattcagaggtggatttcctgaagaccaacaacatttttgcatagctcgtgaggactctctgatactaaactccaataaatgatggtttggtgttttgattgcttttgattgacatttaaaaattacaggagactgagataggaggattgcttgagcctgggaagcggaggttgcagtgagccaagattgcaccactgcactccaacctgggtgatcgagtgagaccccatttcaaaacaaacaaaaaaataaaaaataaaaaaaaacaaataaaaatcacacgcctctttttttcactcaatctgttttccaaataaaatatcaagattctatttgaattttaataatgattttgctgagttttatagcttgaatactatggcaagtataatgtctaaaatgctgtgattttgacttaagaaaaaatttacagttttcttaatatactctttagttcttttaaactctaatacatgaaatggattgctaatgagggtaggaagggggaaagactggggagaaaaatagctaacttttctagcgatagatacatgtcagaagctgtagtaggttcttttgcatgtgtttacttacattaccttctgtaatctgcattgcaattttttcatagacaaggaaacctagacttagagaagtacaatacctgtcatctcgtaaatgacagatatagttgagcaaatctactgaaatggtttagcttcttatctttccagacaacagataaggacttattctatatgaagacatctgagaaatgaaaatatggtttcaggttcatagaatcttttacaccacgtatttctggttctctttcttctattcagatcattctttcatctgtttcttttgtcttcttttccaaaatgtagcaattgccccaaattcagtacttgtctctcttcttaacaatcacatccaatcccatggcctcaaccatcttcccttgcatataatttccacatttacaactttattctcttgattactcaggataagataattgctgaacaaataacagcatatatctcagcttaagagagtaaaagtttatttttctctcatgcaaattctattgcagatattccccacctccttccctaggttgtcctcaaaatgcagtgactcagggaactcctctttctgtcttaacctattttaggtcttagacccctttggcagtctggtgaagccaataaatctcctctcaggacagtttctaaatgtgataaaagaaaaaaaagatatagtgacagatctaataattaaaattcaaagttaatttcaaattagtgataggtaaatatatttcaagatgtctgcactgaatacagcgtgataggtaatatatatgatttatcttggtgacaaagacattggtattgctaacactattatagctgccatctgtattcacaaagggagatgtcaaattccagttaaaagaaagattttcttaacccaagttcataggacttcctgaatggtacagatgctaaggtctagtggctccacaactaccaaagccttcttagtgttctctgctggatcttatgcatccaattgactgacaagcaaagaacctgcagaataataggagacatttgttgggtggggagagcaaacctagaaggggcatataccccttacaattatagctctatgcgctagaattagttatatcattcctcctagatatgaggggactaggcactgtacttcagctgtgtgtccaggaaaaaggtaaggtatggggaatgtggagcaataattatttgaagcaagaatcaccagtggatgctaaaattcgtgagggaaaacaggaccagaaacaggatatttttaaagtctccaagtacctccacataggatacttattaattgcaaagggaaaatagtaactttacagagaagaagaaatctggcagacactaccatatccaagtgatcaaaggtgacatcagtagtgggacacattaacatcatgtgcttctgatatgatacacaaaggagaaacaacctcattcttgtgatgttcctgccaaaaatccataacctgaaagaagcatcacaaaatccccaattgaggggcattccacaaaatagctggctagaactcttcaaaattgtcaaggtcatgaacagttccagaccaaaggaggctaaaagagacaggatgcctcaatgcaagtataatcctgaattgggtcttgggtcagaaaatgggcattagtaagacaattggcaaaatttgaataaggtcaatagatttgaaaataatactgtacctatgtgaatttcctgactttgatcaaagcactggggttaagttaaaacataagatgttgtttttggaaatacatgctgctatatgcaacttactctcaaacatctcagaaaaaaaaatagataagttcatagatagatagatgacaggataataaagcaagtgtgataaaatgttagcatttggggaatgtaggtaaaagtatatgggaatattttgtaccattttctcaacctttcctttaactcgtaaattacttaaaagaaaagcaataaccctggctcttataaaactaaggaaaatggtccatcctttcctgtgccttgtgttttcctgctggtcaaagaacctttggtaatgacaatctgagttggtcactgatattctagtaaattcagaatataacttcctgggctatgtagaaaaatatagctcttcatattttaattcattttcctgacagcacgtttctgtgcttttatgtatggatactgcctagtaatgtgcacaccagtcctgcagatcctggaacattttattatcttgatattgacttacgtatttaggtagatctgaatagcagaattgtcagtcgtttcaccaagacattatcgggaaatctggacttggaagtctacttctgccaggcatctctccacgctggcttctgggccacagaagaaaagatctaatcaaactcatttattaacaaaggcttataatattgaatagcagcttccaggaatctaagaaaatgttcacttttatttctgactaaggaggaactattatagtctttttataccagttagaagtgatgacttggtattaaacttattctaattctcaatagccctgatctcgactctgaccacatgcgcgcacaccctcccccaaccctgtaagtgtgattatggcaaggggaaagttaaagtggagtgaatggtgagtcgtggaatgacagagagcatttagcatttgtaattgacagagttggtgattgactgaatggacactgaatatctaggctaaaagtaattgaatgtggatggtgtagtgagatggagaacactagcaggaagatagactgggctacgcaggggctagatcatgtgttcagtctgggatatactaagtttgaggtttctgtaaaatgtccatgtgaagatgtccaattgggagttggatatttatttatgtttccattcccatcaatcgataagcttcagaggaaataagagtgtaagatttttttgaacaacaggaaaggaagattgtagtaagatatgatggcataatggtatatggaagagttttaaataaaagttagccaggcatggtggcacgcgtctgcagtcccggctactcgggaaactgaggcaggagaatcgcttgaatccgggaggtgaaggttgcagtgagccaagatcgcaccactgcattccggcctgggcgacagagtgagactccatctcaaaaaaaaaaaaaaagggatgaagagggatgaggagaactcaagttatattagcctgaatggaatagatgagtggagagatgggcatgataggtgagttaagaaggaaattctttgcctcagcaaccaactcagatgctttgtgaatctaaattatgtgttgacattctagtagacctagacctgggataattcacttcagcattatgtaatcttaatttttcatttataaataagaaaatattatgcaatacttgccatagttttctaaaagctgaactcagaatgttaatgaaattaaaatgggaaagctattttgcttagaagatattttgttataaacatttcttaaatgaagaggctctagaaatatttattttatagaatttaaaatatagccatcactaataaaggcaggcataattccaacgatttcataacacatcagttattaaatctaattaatatataaatgtaactaatatgtaatttaatataaccctaattcaatgtttaaccaactgaagctggttaaactatgaagaagaatcttcaaattgaccatttctttccaagcggtaaaggtgatacgggattttgtctatacatatagagcaaaggagaattaagccaagatttagaattttaggcaaaaagtgtttatagtatcattaagtggttacatatgtaattttactgttataaatatgactgagtcaatttttttttcaaagattttgtcacaatgggaggcacaaggagtttagacagatgaagactctttctagaaatctacctaatctatcacattagacctggagataattggtttgacaatttcagttgtttctcagcaaaaaaaataagaaactaaaagtgttcagatggcagagaaaaaagtttgaagaggagagaaagaagaacaaaaagaaaaaggaaacagtagacatataaagaaagcacctaaaccagtgagatgccccagctatgcaccagcagcatggtggattacagtagagtttttctacagaactattgtaaatcactggaaaatagtgtccaacttatttgcttaaaattttcagttaatgtgctccagcagcattctgtagacaacgactctcactctccccttattatggaggcagagctgtttctctttgtcccgttctctagcctgtgatatactttttattgctcaagagctatagaattgtatccatgcctattgttgtcctcctgatgggaattcatgtaattgaaagcgtttatcctctcttagtagaaaaattgggcacttggaggcaatgaaaatcccccacctttgtccacggcactggaaatactcttcagtctgctttgttctaaagtttctacttttcccagtataacctgttgaaaatttagtccttcatgagaaatacggctggaatttcttgtggcaggctggccgccggtgttcatgtagttacaccttttgttgctatttcaccactgatcaaaaaataaaattgtattttttcaaaagaaacatggaatgacatgaagaaagtccttaatatatcatggagtgaaaaacagcaagttgccatgcaaatgtcaaatagatcctatatttttaaataagcaactgcatatgtatcatttaaatatatatgtttagatatttgctaaattatgaaccgcagttacccctggggagtgaggttaggaaaagtaaagtgagattttcactttttacattatactttttactttacccacttctgtattgtttgaatctttaaaatgaacaagtgttattttgtaattaaaaaaaacaacaactgacaaataactatggggagtaagaaattacttggaatggaatatgtttaaataattaatttgttgatacactgcttgactattattttcttttgctaaatcaaaactcccctgcttttctcaggaggttgttttgaaaagaagggtaaatgtttctaatgaaatgaacagctcaaccttcccacctcctgcctaaatgcctcattttggttttgttactaacaaatgcaacacgcaaggctttatggtaaagcaagcaatgtgggtttctaacagggcagtacacacccgtagttgctgggaaaccactttagtaatggtggatttattgaattggaacaggaatggagatttggaacaacaggaagtgaggtacctgtaggggtctcagttgtcctgggcactgtgacatggcacccaaatgtcatgcaagagtggcccttccaacatatgcaccaatctgaatctctccaaagtttcttgattacaccataaaacaatgaagagaacagcattgccaataacttcagtaataacttttgcatcatattacaaagggtggtgggtggcactttgtgtggtcatgggtatgtccaaaagaagggagtggtggctagactcagttctcctttagattttaaggcaaaatttagcaaactctatggcagattcttcaactatttgtcagacagacattgtctacttttctggggatttatgattgaggccccttttgaggggagctttgagtgcagtgaggccagatagaagggccaagaaggatgggagcagctgcatgctagtgagcaattcaaagttggattgtgctgactggaaaatcccggttagcaaatcaactatcacagacttcatattcttttcagatgtgcagcctttataacatatttgtaaatgctaaaggactgctccacagggaggttacaaagagaaaagctctgggtggttgtaaaatggacaaattgtaaagccttactagtagtcttaccattcctctcagctcataaaaaagtcctcctcttcatttgactatgcctcaaatctactgcttcttggattattaaacactcttttcctccaggatcttaaaatctctctgttataagttgaattgtgtccccctcaaaaatgatatgttgaggtcttaaaccccagtatcctagaatgtggccttatttggaggtggggtctttacagggttaatggaattaaaacaaggccactagggttggccagtcctttttataaggaatccagtatgactggtgtccttattaaaagggaaaatttggacagagacacacacatagggagaaagacgtgatgatgaaggcagagtggggggtgatgcttctataagccaacgaaccccaaagattgccagcaaacccccagaagctacagagaagcatgcaacagattttctatcacagccctcaaacagaaccaaccctgccaatgctttgattttggacttttagcccctggaactgtgagacaatacatttttgatgtttaagccacccactttgcggtgctttgttccagcaaccttgggaaatgattacactttctcatctgtgatcacagtgaggccttgtcacaatcttcactcattccttctatagaaagctgaaagcctatggacaaggataattgccttggctgacgcatatgtttgaaggcagctgctggcaggcaaccggagactttaccctggtcctagtggagaggaagtctataggaggaggcagggagccttcctggctggcaacccagtgactcaggttgttttcttactccaaggatctctgtgcaagtaggaatcctgacatcttctctttttcacttgtttatgagaccctgcttgttgtagagtaaagagcagaacttaagaatggaatctaatcaccttgaaagaataatctctcatctcctctggtggcaaaggattgggatgtggaggttatagttggaaaattgattcctaggtcaatgtctgtgggtgaatttctctttgaattgttatcagcaatgttatggtgttcggtggctttcaacgaaataaacacacctgacatccttagtaaagagaaagctttctgaaataagagtgagggacagactgggacatgatgctttgcatgaaataggtgttcagtaagtatttgtagagttggaagaagttagattaaacagggctattgtatggcacattgtcattagggagttagagagggcttctggaaaggtttggtcagttttgacttaccttgcaataaatttggactataataaccatttcactagtttgtaaaaggtactggcaaccaaagatggggaatgccactcaatctcacttgttctactttcaaaagcttgctttggtcacattgaaaggttccatttggtgaagtatagcatatcacagaaaacaatggagtttgggagttcgggaacaaatggttgttttgtgataatgaataactttgacatttcgtttgaagttaagttatgttgtttgaacttttctgtccctgaacaaggcatcgtatgccaagaacaggtaacagtttctggatcactggggactcattagtcatggatggttagtggtactacattgtggtcttccttcaatattgaaagctgtaagaagcttgtgacaaattcttaccttggccctcacacagtactggtagggctgggatgttattgcttttgtccaccaacttccaactgtagaagtctaggatgatcacagcagttagagatgatccatttagatagtctatattaagggaaagtatccttcatccatggtgttgaacattcgtaggattaaaatgaaagaagccaaaacctttctagatctttattggtatatcaacagaattagctgattaggtatgcagaaaaaacttgggacttgaagacaccattaaataaataactgtacataaccatacattaaataactgtaacaccattatataaataactaactataaataaagagctctacattcaaactgcttttcactgcatttgtcagatttcacttttaatataattttagttgacttatccctcatcttaccttaagaagataatgagttgaggtggatcttgagccagtgtttagtccaatatagccctttgacttggggaaagatcaaacttcgaaatttatatgcatgactcctctctgggcaaggactgaagtggcaggagaggtgaaagaaggaatcaggacaaaaagtagatgctaaaaggaaaacagtctgtcccgtggagaggaagtacccaaagaaacagaagaactccatgatggagagtaatacaagttgaatatcccttatccaaaatgcttgcgaccagattgttttggctttgggattatttcagattttggaatattttcatacccgctcagtatccctaatctgaaaatccaaaatctgaaatgcttcagtgagcatttcctttcagtgtcatcttggccctcaaaaagttttggattttggagcattttgaattttggatttttggattagggatactcaacctgtactagcgtgttaaaacagtcctggccaggcgcggtggctgacacctgtaatcccagcactttgggaagccgaagcgggcggatcacaagatcagaagatcgagaccatcctggctaacacggtgaaaccctgtctctactaaaaatacaaaaaaattagctgtgccgtggcgggcgcctgtagtcccagctactcgggaggctgaggcaggagaatggcgtgaacccgggaggcggagcttgcagtgagccgagatcgcgccactgcactccagcctgggtgacaaatcgagactccgtctcaaaaaaaaaaaaaaaaatccaaaaaacccaaaacagtcctagaggctacagcctagagcagtgggcaaagagaagcagaatctacagaagatattgttcaaggcctgctatgctaggtctcagatagcaccagaactgggcagggcaagaaacgtcaggcccaggggtctggtttaaccagaagaggtgctgaattttaggatctgaatagcaagggttgtggtcaggaagtcagtttcatgtaagaatgaaggtgagcggatcttaaatccctgaaaggaggcagagagaagaatataggaaatgggtggataatttttgttgcgagtaaaaatgttcaggactttggaggcaggaagagcaggtaaagcaagttcgaggaaagaggctgggtcagaggggatctgaaagcaggagtcagaaacatccattggaggcctggagaacataaatgggaggtgaatagactggggacatagtgcctgggtggaaagaagctggctcgagtccgaaaccacaggctgaaatattaggaaaaagagacccaggaattcagttcagaataggagggatttgtggggcaagaccagtggttcttccagacattttatcagagataacaaagcagaggctgtctgttctctgcccttggtgtgagaagaaaaggactgacaggagtgcttggcagctcaagccagttatggagctgtgggtgctagtggctattaactaccagggaattagctctgctgaatgagtcctcacgcagaggcagggatagaacgttgcattcagaagactggccacggaggccggctggggtggctcacgcctgtaatcccagcactttgggagaccaaggcaggaggatcatctgaggtcaggagttcgagatcagcctggtcaacatggtgaaaccatgcctctactaaaaatacaaaaattagccaggcttggtggcgggtgcctgtaatcccaactactttagaggatgagagaggagaatcgcttgaacccgggaggcagaggttgcagagagccgagatcacgccactgcactccagcctgggcaacaaagagtgaaactccgtcttaaaaaaaaaaaaaaggaaaagaaaagaaaagaagagtggccacagattggcttggctggagaaggcatttttttatagggagatatacgtgagtttgacgggatgggctagcaggcggacattcaggttttatgggataggcaaaaaggtacaaatggtatttggggggatgtgaatggcatctgagaaaggttgatccaggcttgtgtggaagctggctctgagcataaaatgccagagaaaggcttgtacaactctgaggtcttttcttttcttttcttttctttttttttttgagacagagtcttgctcttgtcgcccagcctagagtgtagtagtgtgatctcggctcactgcaacctctgcctccctggttcaagcgattctcctgcctcaccctcctgattacctgggattacaggcacctgccaccaagcctggctaattttttgtatttttagtagagacacggttttaccatgttgcccagggtggtcttgaattcctgacctcaagtgatctgcccacctcagcctcccaaagtgctgagattacaggtgtgagccaccgcacctggcctattttctattttttaaccagtcccaagtaagggtattggttagggttgaggcaatggaaatctgaaagaaagggtgagttaggtatttcactggacacatgtggagaatgttggtgatttaatgcagagggaattgtggttaaaaaggttaatgtaagaagggtcatgtggggactggaaatcacaatagagaaacagaggccagaatgctgaactcataggaagtgggtgaccatgggtgattaaaatgtacaatagggctgggtatagtggctcatgcctgtaatcctagcactttgggggactgaggcagttggatcacctgaggtcaggagttcgagaccagcgtggccaacatggggaaatcccaaccctactaaaaatacaaaaattagccgggcacggtggtgcatgcctgtaaccccagctacgtgggaggctgaggcaggagaatcgcttgaacccaggaggcagagggtgcagtgagccgagactgcgccactgcacttcagcctggggaacaagagcgaaactctgtctcaaaaataaataaataaataaataaaaataaaaaattaaaatgtacaatagagtgtgtaaaaccaggaaatctacatcttgacacttaactacccaagacgcaattggttcctcgtctgatttttaaaagaagtttccactttcttcggaaaatcacgacagtccttgttctcaatttctttgtttttaagaagagaaatgttgtatgatttcacttatataaactacctagaataggcaaattcacagggatagaaaggtggaatggaggtgaccaaaggtggaaaggaaggaggattgttcaatgggtacaacatttctgtttgggatgatgaagaatttctggagatggacaatggtgatggctgcacaacactgggaatgtgcttaatgccattacttaaaaatggctaaaaatcatgcattttatgttatgtatatttacaacttttttttttttttttgagacagtgtcttgctctgtcatccaggctggatggcggtggcatgatctcggctcattgcaacctccacctcccaggttctagcaatgctcctgcctcagcctccccagtagctgggattacaggtgtgtgccaccatgcctggctaatttttgtattttgagtagagatggggttttgccatgttggccaggctggtctcgaactcctaacctcaagtgatctgcccacctcagcctcccaaagtgctgggattacaggtgtgagccaccatacctgccatatttacaacttttaaatcataggaaagaaaccactaatgctttgacaactgtgagattttgaatctcaactgtgagattatggtttgtggaaatttctttatgtgattaaaaaagatactttttttgccaaaaaatttgttttcgctgtcatgcaagttctcctgggtaagcacctttggtcttgttttgtgcatagcatacagagcagcaattgtatattgctaaagaaagcctgttttttttttcttgttaatttatttaagttccttgtagattctggatattaccctttgtcagatggatggattacaaaatttttctcccattctgtaggttgcctgttcactctgatgatagtttcttttgctgtgcagaagctctttagtttaattagatcccatttgtcaattttggcttttgttgccattgcttttgtgttttagtcatgaagtctttgcctatgcttatgtcctgaatggtattgcctaggttttcttctagggtttttatggttttaggtcttatgtttaaatctttaatctgtcttgagttaatttttgtataaggtataaggaaggggtccagtttcagttttctgcatatggctagccagttttcccaataccatttattaaacggggaatcctttccccataaggatatgaacagacacttttcaaaagaagacatttatgcagccaacaaacatatgaaaaaaacctcattatcactggtcattagagaaatgaaaatcaaaaccacaatgagatactatctcacactagtcagaatggttgttattaaaaagtaaaaatataacaggtactggtgaagttgcagagaaataggaacacatatactgttggtgggagtgtaaattatttcaaccattgtggaagacagtgtggcgattcctcaaggatctagaactagaaatgctatttgacccagcaatcccattactgggtatatacccaaaggattataaatcattctactataaagacacatgcacacgtatgtttattgcagcactattcacaatagcaaagacttggaaccaacccaaatgtccatcaatgtttgaccgaataaagaaaatgtggcgcgtgaacccgggaggcggagcttgcagtgagccgagatcccgccactgcactccaccctgggcgacagagcgagactccgtctcaaaaaaaaaaaaaaaaaaaaaggaaatgtggcacatatacaccatggaatactatgcagccataaaaaagaatgagtttatgtcctttgcagggacatggatgaagctggaaaccatcattctcagcaaactaacacagaaacagaaaaccaaacactgcatgttctcactcacaagtgggtgagttccataatgagtgggtgagttccacaagttccacaagtttcacaagtgggtgagttccacaagttctataatgagaacatatttgcacagggaggggaacatcacacaccagggcctgtcggggggttgggggtcaaggggaagaatagcattaggagaaatatctaatgtagatgacgagttgatgggtgcagcaaaccaccatgacacatgtatacctatgtaacgaacctgcacattctgcacatgtatcccagaacttaaggtataataaaaaagaaaaagaaaaagaaaaaaaaccctgccttttgctttggcagtcatcattccttccatcttctcatgttttcttatttaactcagtagttctcaattgacagcacaaaagaattactcaggagagttcaaaaaacacctatggctgactcccccaagattctgatttccttggtgtggggtagcctgggcatgaatattatttaaaaactcctctcatgattctaaggtggtagccaggattgaaaaatgctggactttcaagtttttgttttctttcttttcttccaaaaaggtgaagccctgacttgggaagaattcaaatgcgagttaggcttatgtttgatgtcactgattcctaaagatcagtccattgattctcctcattctcaggagagcatttggtgtcaaaatcacagcccaaaactcttaccctagttcagcatctaactctcttcagtcctgaaactgtttttgtcactctgtccatataatcacagtgttgtagaaatttccagctaaacattgtctcaaactttttgtacctagttttaaatcaaaatgtagtacaaaattattaaatacaacgggctttaaaatattgagattttggtgatcttttttgtagaatgcaaatactaatgaaactaattttttcttttgctttcaaactatacatttcttctaaaacttctttcaaagtagaatttcataagtggaagaacccttgaagattattttaatagaattccttaattttagagatgaggaaactgagactcaaatatattaattaatttatctaagtgtcttagtccattttgtgctgctataagagagcatacttgagactgggtaatttatattgaacagaaatttattggctcacgattctggaggttggaaagtctgatatcaaggtgctggcatctggcaagggccttctggatgtgtctacatggtggaaggcggaagggccaagaggtaaaatgtggctgaatttgtgcttctattatggcatgaatcccatccatgaaggtggaggcctcatggcctaatcatttctcacaggcaccaccttttaatactgttacaatggcaattacatttcaacatgagctttggaggagacaaaaattcaaaccatagcactgaagttatacaactagttaagaagagagaacctgagactgaaaccctgatgttttgactcccaatccagaatgtttgatcccctacatcccaccgcttcgctgtttccattcctttctcctgttttcatctattttcactaagagggcaagatatttgctaactgctacacacccaaattgtataccaggcaggtcagaatgactctaacattttatttaatgaggcagaataaaatatcttcctactaaacagtgacaagtgtttgttttaaaaaaaagtattgtgcacaaaaaaaaaaactactttcagcataggctatattttacaaaataaatttacagtgggaaccacagagctatttagagtgtctggtataaatgattttattgttactctgcttttttgaaaaagaagtgtgtgaagcagaggtaagtagtactgaggaaataataactaaaatactaaggacgagatgcacatgggaaaagttcttcattaactgtaacgtggtggagaaatgtatgttctagacaggtcaatcatggaattagaaaaagttgggatcttggattgttgagttcaaatccttagttttaaaactgaagacttcaaattttgattgactacagatcaatcaacaacctgttggagttggaaacttgaatctgattctccatccttgtttgggatatgaaaaaaaggaagacatttaagagtatttttttatttatgaaactaatgtatcatcatgtaaaaatatgaaatagaaagtgttaaaaattataaagaaacaagaatgtgtttttataatctcattttcttactttacgtaagatggtaagtctattttggaattaattgtttttaagaatagtattataattcaatgttagataaagatttatttaaccctttcccctttaacaagtgtttgggttttttaagtttgcttccaagttttcggtaaatgatgcttcaatggatatctctgtttgttatcttagtatgtatcttagattaattcctcaagataaatatttaaaggtatggtatatgtaatattcttgatacatacttccatatttccctccagaaatgtgtgcacctatttaaatgtgtgtggaggtgcacattttaacattcctcattattctggctgccttctataaatcaagctaccctggtattatggctctcctccagaaatctaatcatttaaacacatgaagtgaatgtgtgaatggacaattaagtgctggccaaatgtggaaaaatgttaagtgtaaatcaaaggcaactgaaacgttaaatacaccttccattcctccgccacatccatgctctttcccatactccacatctgctcactaaaattggaaataaactgtaatgaaccagaaatgtctgacttactggtgtgtttaggtgagttttattgaaacactgactgaccccaccactctaataccatcaccttaatgtttgtatcttagattaattcctcaagataaatatttaaacgtatggtatatgtaatattattgatacatacttccatagttccagcaaccacttgtcatcctgtgtcccccaaggacactgcaatgactgtcacagtgacttgtgctcggttgaggagcaagtggtggctgaaatccagccccagtcagctccccaaaccaaaccacttttacacagtgtctatgtgtaaagttggtttgctttggggagattgatccccataagggatcagcaccagccctgtgtctatctcttcttctcctggggagatgttggctattttgctagctggagaagggcacgcaatttgttgtcaggagacaggttcttaagttccattggtacatgcagggcaagacaggcagagggaatctgtcactgctacaggcacttcataagcccaggtatagacgataattgaaatggattgatttcatagtagtctaatacagagtggtgctacaatctctgtatgtgcctatttagaaaataacttcatatttaattcttcactttacataaaagatatgtgtattaaatacaccttttattttagaacagttttagattttagatttaaattgggaagacagtagagatttcctatctaacccacacccagctcccgtattagtaactaacatcttgcattagtatggtatattacaattaatgaaccaatactgttattttattattaacttaattcatgctttattccagttcccttagtttctacccaatgtccgttttctattccagtatcccatccagaataccacattacattctgttgccatgagtttctcagattttccatgtttttgatgaccttgacagttttgaggaatactggtcaagcgttttgtagaatgtacctcaactgagatttgtctcatgtttttctcatgattaacttggtattacaggtgttttgagaggaagaccacagaaatgaaatgccattcttattacatcatatcaagcatatattctaacaatatgatttatgacaactaatgttgaccttggccaactggctggggtagtatttgtctagtttctcctctgtaaagtccttccttaccccctttccacactgtactctttgaaggaagtcactctgcacagctcacaatgaaggagtggggagctatgcttcccctctttgagagttgtgtatgtacacaaattatttggaattcttctgcatgggagatttgtctattctcccctatttatttatttattgaattatttatatcagtatagcttcatggatatttattttagactttgggctaaaaaacaatactactttattttattgttcaaattgttccagcttctagaagttatatttttatagagaagatatgtttttaaatataaaaacactttaaaaaaatgaagtcaacagaataaaatatttttaaattttccttaatgggtgttctttgtaccatgtttccatcaaataacattctgattgaaatctaaaaattagtgtttgtattttaagtgctaagatcagagaaaaagtcacaagtttcccagactgagttaggcaacatgtgactcagagttataaggaatacctttcccattcctgcattgcaaccagtgttacagttacagaagtgactagtgtaacttcccctcctgggttccagctgccaggacttactttagttcttttaacatatccttcccaccaaagataagttttttgaacagtttccccatgagtgctccccccaccccaacttgtgccttttattcatgtctttataatatttattggttggctggtgcaattgcagaggttggcaagtctgaaatttgtagagcaggccagcaggctggaaactcaggcaggagttaatgctacattctagggacatttttttcttctctggaaacttcagtttttgctgacaagcttttcaactgattgggcaaggcccacccatgttatgagggggaactgtacaatcagttgtcatttaagccaatcagtcaactgatggttggtgtcaaccatatcttcagaataccttcactacaacatctagactcatgtttgattaaataactgggtgccataaccttggcaagttgacacctgaaattggccatcacagtgaccaagacagaaagtgtaatgagcaggaaagcaccccagtgacaggacagtgaaagatgagcctggagacggggagtgggaggagtgctttgacagaatggtcaagagagatggcatctgggtggagatatgaaaagatgtaaaagaagggaaggaaccagttctgccaagaatttatacttctacaatttcccagatgatattgatgctgttgccctggagcccatactttgagaaccacagagtaagggtatacctctgttattatccaatgaatcctgagaaagcccattaatatctcagtgtgaccattttttctcaaaattcctacctcacatgctctgaggggctggcagcttttctgggaaggtaaaatctcaagagggaggctttgaatgattccaggacaaagtgaagataacatactaccgcaggtaaagtctaggtttacttggaggtggctcaaaacacaaatcctgtcaattttaatgacacatgaggccatgactctgggtcgtcactctgggcaagccattgaacccattagaacctcagttttcccatctgtacaaaaagaggtgataatgggtaagcaatcctggactgcattgtggtagtgccatcaagcaatgagatttgtcaggaaggaagtgtgattcaagtacaggcactttgttatctgatgcctgtgtgttgagtgtgaaggaggggttaattattcctctattcatgtcctttctattctcaaaatttcttatgtgggaggaaaatcttggtgcggtaaagatcacagccaccctggggtcagacagaggactgtgtcaagcttggtaagcgtcaccattcaggtgagtgggaaagagactgaaccccattaaaccagatgacctccaaggccctgcccgccccaacatctgagggctgcctggcttgtctgcacagggtgctcacagtactcctgactttgacataattttaacattaaagtcacaaggatgccctggatcacaactgctggagaagagatggtagtgggatttgtttcccaggagactttctgattctagtggggccaggaccaacctccaaaataagaggtctttgcaactgctgcgagcctcctggcacctctaccctctagcgagaggctgcctctcctgccccaccccggtttcaagcacgctgcagggcaggaactcactgtgctggcaaaggtgagctggagacctggcacggcataaagcttttttaactgaccctttttaatttcatcttccctggacttaatctagagagtcattgatgaaacaaacatgccattttctcccgatttcacgcttttaaatgtcaacaacaaacaaacgtttatatacacaaatgttgctgaaggagacttttggctttagacaagggtaaaaactgaacctcttagtgtgactttggttgattttttaaaaaatctgtaatttgacatataaagaattattaagacttttttttttttttctggtaggcattgaatgtgtccttgaaaagaaaaaaaatatgctcagtttcaatcttctgtctatgggtagctagttatcccagccttagttattgaataaggagtcttttcaccattgcttattttattttactttttgagatggggtcttgctctgtcacccaggctggagtgcagtggcacgattttggctcactgcaacctccgcctcccaggttcaagcgattcccctgcctcagtctcccaagtagtttggattacacatgtgcaccaccacacctggctaatttttgtattttgatagagacagggtttcaccaagttggccaggctggtcgtgaactcctgacctcagttgatccaccccacttggcctcccaaagtactgggattacaggcatgagccaccgtgcctggctgcattgcttatttttgtcagctttgtcaaagatcagatagttgtaggtgtgtggtcttatttctgggctctctattctgttccatcagtctatgtgtctgtttgtgtatcagtgccatgttgttttggttattgtagccctgtagtatggtttgaagttggataacatgatgcttccagctttgttctttttgcttagattgtcttggctatttgggatctttttttggttccatatgaattttaaaatagtttttttctagttctgtgaagtatgtcactggtagtttgataggaatagcattgaatctataagttgctttgagcagtatggcccttttattgatattgattcttcctattcatgagcatggaatgttttttccatttgtttgtgtcatctctgatttatttgagcagggttttgtagttcttcttgtagagaatttcacctgccgggttagctgtattcctaggtgttttatttcttttgtggcaattgtgaatgggattgtgttcctgatttggctctttgcttgactatttttggtgtataggaaggctaagtgatttctgtatgttgattttgtgtcctgagagtttgctgaagttgtttatcagctgaaggagcttttgggccaacactatggggttttctaaatatagggacatgtcatctgcaaatagggatagtttgactacctctctttctatttggatgtgctatatttctttctcttgcctgattgctctggccaggacttctaatactatgttgaataggagtggtgagagacggcatcattttcttgtaactggaccccttccttacaccatatataaaaactaactcaagatggattaaagacttaaatgaaaagcccaaaactctaagaaccctggaagactactgaggcaataccatcttagacataggaatgggcaaaaatttcatgatgaagatgacaaaagcaattgcaacaaaagcagaaattgagaaatgagatctaattatactaaagagcttctatataacaaataaaactatcaacagagtaaacagacaacctacagaatgggagaaaatttttgcaaactatgcgtctaaccaaggtctactatccagcatctataaggaacttaaatttacaagaaaaaaacaacctcattaaaaagcaggcaaagggcatgaacagacacttttcaacagaagacatacatgtggccaacaagcatatgaaaaaagctcagcatcactgatcattagagaaatgcaaatcaaaaccacaatgagataccatctcacaccaatcagagtggttgttattaaaaagtcaaaatataatagatgctggtgaagttgcagagaaatgggaacacttatataatgttggtgggagtgtaaattagttcaatcattgtgaaaaacagtatgatgattcctcaaagacctaaaaatacaactaccattcaacctagcaattccatgactgggtatatacccaaatggatataaattgttctatcataacgacacatacatgcatatgttcattgcagcactattcacaatagcaaagacatggaatcaatctaaatgcccattgatggtagactggataaagaaaatgtggtacatatacatgatagaatactatgcagccaccaaaaagaatgagatcatgtccttttcaggaacatggaaggagctggaggccattatccttagcaaactaatgcaggaacagaaaacctaatactgcatgttctcacttgtaagtgggagctacatgattagaattcatggacacatagagaggaataacagacactggggcctatcagagggtggagggtggaaggagggagaggatcaggaaaaataactaatgggtactaggcttaatacctgggtgatgaaataatctgtacaacaaacccccatgacacaagtttacctatgaaacaaacctgcacgtgtacccctgaacttaaaataaaagttaaaaaaaaaccccaaaaggtgaagtgttggtgaggatgtggagaaaagggaacccttattacacaattagtgggaatgtaaattagtgcagccattttggaaaatagccaaggaaaatttttttattgagtcagatgatgttaccttacagcaatagcttccaaaggggatgtcctgaatagtagaacttctctttacattttcaaacctctttttactttctgattttgagtttcataatgaacatgtatcaatacaatagcacactatgtattttataaatgaacaaatatgggaaaaataagatatgttcactttcctggctgaccctagttagtctaaactatcagttataggatccatttgttctaaatattgaaggcattgttgggggcagtggggagggtgaatgatagacgcaaattccttgaaggaatagaaatgtgactactatgctgaaaagcaggacccatggagtataaatagagtattcactgtgcttttacatttgtttccctggaggaaacgtaaaacaaatctcaagactttctggtcatttctaagtcataaacggccactagtcactaatttatataaccagcccaatgtaaatatcaaacgtgtgagtttcatttcatctcacaactcctcccctttcccagttctggccccatacaagcccgctgcctgcagtgggatggaggaagatggtttctttttccttccctcccatttatttgtctttgtgcatcttaaagccagcctgaatttctactccctacaaggttgaagtgggtgggtcaggaggtggggagagagctaaggaacgttggcgtgagttgttgttgtgtttgagtctggaaggtgttgggagctgccccccctcactcagggcctcatttatgggctcttcggataacccccatgctctagcactgggatcttgccctgtggatccctccatgcaggtggcaccacaccctctggctggttgtgatgggccttctcagctttgagaattagcaacacacttcctattgaagtcatctgtccctgtgggtagcccacttgggctggatgcaaactgaacctgcactgattctctcttgcatgtggcccacatgagctccattttcctccgcaaactttgggtgcacagccccacgacgacacagacagcttttcttgcgtgccaccaaagtggtgggccagagttctcttatccttaagattttcaggtgtcaccacgtccaccaattcttggcagacatgaatcaatacttccaagggttttggtgaagcccttttccctgggctgcagatgagggcagccatgtcctgtctcttccacctgttgtggaaggggttcatggcaaacatcttcgaacatcctctaatttcccaattcttgatcctttcgtatgcttgatgtgtgagagagaagagagaagagagaaacgcttcttgctgctttttttttttttaatcccacatggtgaccttagactttactttggaatgtgccatttaatatctggggacctcagcccaacacagggactaaatagctctgttttaacattttgtttatatacacacattcatttgaccaaatgaacatgttccagcttttttaacccttgcccagcaaatcacttaattcagttaataaaaagactaaaataatgaggccaaccttattggccacgaacatctgttgggtattcctaaattgatccctgagttaatctccacctttaaggagtttataattttatttggcaaattgatgttataatgaaattcctgggcatgaaaaaaacctaactatgtaatgttggatagtgtgagttttcccaaaagtaccagtataagcaataaatgctataactgatcatgaattgtttacagtgattgagtagaatcattgcatctggtcatgaatagaaagagcacctcccagacggctggtctgctgccaggtgtgcagttttaggggtctccacactcattctattcacatcttttgactttatcagctgtgtggtggatctgtggttacaggctgatgtggtttggctgtgacctcgctcaaatctcatcttgaattgtagctcccataattcccacgtgtcatgggagggatccagtcggaggtaattgaatcacgggggcgggtctctcccgtgctgttctcgtggtaatgaataagtctcacgagatctgatggttttataaatgggagttctctttcacgagctctcttgcctgccgccatgtaagaagcgcctttgctcttcctttgtcttctgccatgattgtgaggccttcccagccatgtggaactgtgagtccattaaacctctttcctttataaattacccagtcttggatatgtctttattagcagtgtgaaaatggactaatacatgagccacattgttacagagtttctgaaggtcattaagagaagtccatgctgtgggctgagctgggactcaagaatctcaaaggagagccagtgcaatcaacacgaagggcccatcttgaactcctaaggcagggcagagctgggtcttatggagacatgtggctttcaggtaatccagtgagcacctgtgttttcctcctataattcttgaggaatggatattgttctatatttcagatagtataataataaatacctggaaaatactgtatgaccccaaacaacaggtaaaatgtcaaaaaaaaccttttatctacacaaagttagacaacaaattcaaataatcttatccgtttattcattctcttccaatacaatcatgtatcatttaatgatggggatgagtttggaggaaggtgttgttaggagattttgtcatggtgcaaacatcatcaagtatacttatgccaacctcagtggtatagcctactacacatctaggcttggatagtacagcctgttgctcctaggctataaacctgtacagcatgttactgtcctgaatactgcggcaactataaaataatggtaagtatttgtatatctaaacacacttcaacatagaaaaggcacagtgaaaatatggtataagagataaaaaatggtccacctgtacaaggcacttgccagaatggagcttgcaggactggaagttgctctgggagagtcagcgaatggctgatgagtgaatgtgaaggcctagggcattattgtatgctactgtaaactttataaacactgtgcacttaggatacactaaatttattaaaaatttttctttcttcaatcaataataagtgaacattagcttactgtatttttttttttactttataaactttaatttttttttagagatagggtcttgctctgttggccaggctggagtgcagtggcacaatcatagttcactacaacattgaactcctaggcttaagcaatcctcacacctcagcctcctgggtagctggtactgcagacatacactactgcacccagctaatttttaaattttttgtagcgactgggttctgctatgttgaccaggctggtcttgaactcctgactcaagcaatcctcctgcctcagcctcccagcatgctgggattataggtgtgagctactgcacttggcctaaactctaatttttaaaatcttcttgactgttttataataacacttagtttgaaacacaaacacattgtacagctgtacaaaaatgttttctttctttacatccttattctataagcttttttctgtttaagtttttaaaaatgttttagtctgagtgcgggggctcacgcctgtaatcctagcactttgggaggccgaggcgggcagatcatgaggtcaggagatcgagaccatcctggctaacacggtgaaaccctgtctctactaaaaatacaaaaaaattagccgggcatggtggtgtgcacctgcagtcccagctactcgggcggctgaggcaggagaatggcatgaacccaggaggcggagcttgcagtgagctgagtttgcaccactgcactccagcctgggcgacagaacgagactctatctcaaaaaaaaaaaaaaaagttttaaacctttttaaaaaatcaaagtcacagacacatgcattagcctaggcctacccagggtcaggatcatcaatgtcactgtcttccccttccacatcttgtcccactggaaagtcctcagggacagtaacacccctggagctgtcatctcctctgataataatatgggcttctggaagacctccagaaggacctgcctcctgcctaatgctgttttacaggtaatatttttttctagtagaaggagtacactaaaataatgataaaaactgtagtaaagtaaatatataaattagtcatatagtcatttattatcataatcattatgtactgtacataattgtattgccagacttttatacaactggtggcacaataggtttgcttacaccagcatcaccacacacgtgagtaatgtgttgtgctgtgacattaggacagctacaatgtcaggaggcaataggaatttttcagctccattataaccttacaagaccactgtcatatctgcagtacaaaacatcattatgtggtgcatgactatatttactgagcaccaaatatgtgcccaggcagtgtgctaggggctggaagtgacctcgaagtctagtaaaaaaaccacaacagtaaaacaatatgtgtaattcaaagtgacatatcctgtaatagctggttgcctacctgctccccagagagaaattaaacctgcttgcttaacttattaattttaaattcatgtacttgcaatataaaaacatattttaaaacatattaggagaataggatgtcttctgtagtgataggctatttaatgttctcttcactgtgttctaaaaaaatcgtgatcgagtgtaacaaaatggggaagggagggttagcataaactctcctttgatgtctatgctgtggatcagaaaactcatgaatatgttaacaactggattttctcctaatatgaaaacaactctttggcttcttttgcaaatgtgaaaagttaaccataaatataagaccttttctttccactaaaactagggcacaatcattgttttcctcttattggagtccaaatgggtttccataatcttcagatctagtagttgtatttatcgatgacataaatggaaagactaaaagataaagttaagaaaaattcagtggtttatggcttcaactctactgataattttgtatataaagggatcctaaattagactgtacacacatttgccatttgagttccaagcattttagcaatagatcaaaagatcttaatgcctgatagttgaaagattacttccaaattttttttatttttgtgaaagccaaagtccttttctcaacatgacagtcacaattttgtcaacaatctacccgttatttacaaaggtttaaaatctgataatagatatttacttggactatacaatgtctcagtgggagcaatagatggtttacaatgggtctgaaaatgttgcaaatagtcaaaactggcattgcaacaattcatttccaaaaacacactagactcgtgagtttttggtttttaagtttatatagcttgcttctggtgttaacgttctccacacctaaggtgccaacatgcatggctactctttgtccccagagaaacattgctaatttgtaccaaatttcaatgatgtgtcaagcaaactgtcattttggaatgatagtaagcacgccttcaacaacagctctttatttcgtccaaaacctttgggccacacaattctgacctttatcacactctcagtacctttcattcattattagcttgtgcttctggggccccgggaattgtcaactatggtcaaaataatggagcaaaatagcaagaagaacttgcgtttcctatatcattgcatttaatctttgcaacaactctttgaggtggaaattgccccaattttatagattcagcttaaagaccttgatttgtccaagatcacacaaccactaggaggtataatgttcaaataaaaatgtctgaaaagagctgggtgtggtgggtcatgcctgtaatcccagcacgttgggaggctgaggtggggggatcacctgaggtcaggagtttgaaaccagcctgggcaacatggcgaaaccccgcctctactaaaaatacaaaaattagctgggtgtggtggtgcatacatgtaatcccagctacttgggagactgaggcacgagaattgaatgaaccctgtgaggcagaggttgcagtgagctgaaatcgcaccactgcactccagcccaggcggcagagtgagactccatctcaaaaaaaaaaaaaaaaaaaaatctggaaagatagattacttggcctcaatcatagtaaaaaagtgtcagttaaaactgcatggagagatactattttgaaaagcatcaaaaagttcgaagatccatcatatttgtaaggctatgggagtttaaattgtacaggcgttatgaaggcatttggttacatctaccaaaattaacaccgcacatatttactcatgtgcaaattgacttatgtacaaatttactaattgtagcattgttgataattgtaaaatattaggaacacacctaattgccattaatggggaactggtaaaataaactagaattcctctgtgcatggaatactatgcagtcatcaaaaatgacgaagatgtggccgggtgcggtggctcacgcctgtaatccagcactttgggaggccgaggtgggcggatcatgaggtcaggagatcaaaatcatcctggctaacacagtgaaaccccatctcttctaaaaataccaaaaaaaaaaaccaaaacacaattagccgggcatggtggcgggtgcctgtagtcccagctactcgggaggctgaggcaggagaatggcgtgaacccaggaggcggagcttgcagtgagccgagattgggccactgcacgccagcctgggtgacagagtgagactccgtctcaaaaaaaaaaaaaagaaaacagaacaaaacaaaaaatgaggaagatgtttatttagtgaaatagaaagatatccaagatatgttgctaataaaaacaaaaaaaaacacatggcacaaataaggtgcatgttactatctgggtcttttaaaaaggggtgtggaagaatgtgtgtgtgtgttttcttcaatatgtgtagaatatctctggaaggaaatttaaaaactggcgacctcagctgtctccagagagggaaaattggtgggttgcaggcagaggtgaaagattttcccactatgactttgaaaatatcttttcaagtttaaagcaccaactgcattatatatcaagagtaaataaaatacaattttaaaatgaaatggcatttgtaaaacacttgatagatgttcagttaacagccatcaggatttattagtaattgtggtttttgccattaaaagtaattttaaaagtaatggttttgccattagttttaatgacaaaaaccacaattagttttgcaccaaccaaataccttacgcttctggtgagggctcagaagagagatcataagtaaagaacactagaaaggatgtttaatattatttccctttttaaaactggtggttgtcaaagcagtctgaaggaaaagtctccagaactggtgatcatgttcacatagcagtagtttggagtcaacagaaatcatcttcaccatcaacctagctccgaaagaggccgagccaatctagttcccttggccaaccaccttcctcccaacctatacgttggggtgatccactacaaagctctcaagagtatacacaatgctactacagtcattgtgagtgagatctgaagggagcataggctaggactcatgagattatagttcagagtttctactgtaattcctttcagcaaagtgaagagcatgtcactggggttacaagtgttactggctacttagctagtgctagattacccaaaaaagtaaccgggtctcatgggcagaggtgggaaagtctgttaagcacatagtgaaggatgaatctgggctgattggaaaacatttgtttgaatgaatgtagcatttatttccaagaataagcatgtccagactgattgagcaagagttatatttagttcagtcgttctgatgtccattttgagaaagctaaaccagcatgccagaaggggtcaaagatcacattttgcatgaaagaaaagccaatggaaatgggactgttagacttaaacttttgggtattttacactaggacttagaaaggactttattcctttttatattttctgtctctagcattgcaagtagcaacagagtgaatttttggtatttggaatactctctcctcatttttcctttgggaaaatcattagcctatttgatttgactgctgttgaatatgttccatgacatccataagtctaccttcaggcattgcttgtgcttgtttattacatatgattaattgcttacataagaacaatgatgatccctgcagggggaggagggatgtgaagaacaacttacttaggcattccaggggctaacaagggatggtttgatacagctcattcttgttttgaatcttcatgcctcttgagaaagaaaggagcagaatatgctttgcatggcgctatgtcctcccaggtcctatgttttcttttttgtattttatcagttctctacgtaaggattttctcagtttaatataatttccatttttaaaattcaaatacctacatatgaggtgggaaaggaaattaatcagatgcattcctataaactgcagacttaaattaagaccttgagcaaactggcattttgatgacttgaggattcagtgggtgggacagttgtacatcttgaactctgggtacactgccgaaagcgaggcctgagaaggctgtgttgaggaaggagtgtcagtgactgagcctgttggaaagggaggctgagagagatgaggacacatacgtaagggagaacacattggctggccaggtgtttttttttctgctgtgggttttgattagaattctgggtctcattaagtgacccatgttgaatagagattggatagggctggcttggaaagccctcagtgaagagatgaactcgacagcatgataaggaagtagatgcaaattcaggacaggaaatggagaagggcagggtgagaaaagggaacaaatttacaatttgtgccattagccatttattagaatttggtataagaatttgtggaattattgtttccttctggatttatggtacaaaaacctactgacaagtgtcactaaaagtgatgtctttattcaattatcaaccaaaagttttacactaaattcttttgagtctttgaatgtttatgttatttccaataatctttccagttcttttaaaaggctgatttttaggaaggctagcactttttgatcacagaatagtttccccaatgagtatgatagcttcaatatctttcaaattagattcttttggaaattgaactgtgtcaaatcaaataaaacaagtagggttttttgctgttattgttgaaggtattatatttgcaagtttgtacaatttagcagatataggaaaggtctaatttttttctttagctagaatgttcagttcaaattatacagatataagcatgagacctaaatgaactctcttctgatgagtaatgaatggaaggtagattactcatttcttcatgttcaaaaaacaaattatgtctctgaacacagttgtttcaatgtttttaacttatgttctcaagctcttcccatttctttatcagtgatttgggaatgtgaaggcagtcttgttgtagtttccaaagatttaggcatttttgagactctaagaatagttcattaagccaccaattagtcccttaattttatttaagctgagcaagcaaggcccacactaaaagtcagaagaatgcggcatctacccagagaggctgagggtgggatagaaagaaggaggcactccaagtttggagacacagattctattccagttcctcaagctgcatgaccttcagcaagtctcctgtgttgttcaggaccccagtttctttataagtgcaatgaagagtttggactcaacaacttataaagaaacattcattctaattgtctattgtgtgaaaagaatgtgagttgttctagaaaatatgaatctgctccccaattgtcctccaagctctggttctaaatttcagttattatagttacttctttcgaggtaaatcattgaggaagtcagttaatgcagagatgatgtctggaaggagtttacaagttcattgttcaaatagtatttgttgggggccaactacaactacacatcagggattgtgctcacattggactagtgtctttggaaaacagagtccttgtgtgccctttttgaatttacaggccaacttggggaagcagagagacaaataggaaatccaacagcatgataagtagtataatgagaatgtttagggagatacgagcatttataggagtagcactcaataggaaatcaaggaaggcttcctggtggctatgatgtctcaagggagacttgaagcatgagtaggagtatgtcagatgaaaagggatgggaggaagatttcaggtagggtaatttgcatacgtgaatatttagacccagagaaagtccagagggactgaggaacttaaaagaaatccagtatgggaggagcatagtacctgttggggagggtggggactcttgataaatgaggatagtaattcaagttctttggctcttgagttacttttggacaagttgagcttcaagtagctagtacataggaggagcttaataaatatttattgaatgaatgaacatgtaagtaaaaatgtctaataggtacctggcaaagtggacttcctagtcaggaaagagaggttggttggagatttctattttgaaattttcaatgtatatatgaaagtaaaaacacaaggagtggttgtgatcatccaggagaaggtatgcagaggagggaagagggtctaggggctgaatcctggggtacccacacctgagaggagggagaggaagaggggctctcagaagagcctgagcaggaagggccattgtaataggactaaacactaagcccctgaagtcagctctctgggggcagaggtttttgttctgtttattttgggatgcctgctgttgaccagattatgctcccctacccacccaaattcacatattgaagccctaacactcaatgtgactgtatctggagatagggtctttgggaggtaattatggttaaatgatgttttaaggctgggaccctactctgataggactgtggccttataaaaagagctctctctttttctgtcctcctccttctacctcctccaggacccaccccaaccccacactgagaaaataaatcgctgttgtttaaatcacccagtctatggtattttgttacagtagcctgagctgaccaaaacagttctccgcacttagaaatggtcctggtaaatacagctaatcaatatttttttgagtgaattgaatgaatgagtcattcactggcatgcttataaatgcattactccctccacagtgtgattgtcattgagcaggttgggagaagggaggagctctcgcaaacatggaagtcctgggtgcttagggagaatgggaaggtgccgtggtcacaaaatcggaagaaagagctgaaaggctgaaaggctgaaaatgctaaactgctcaaatctcctctgtctttttttaaaaaaaatcatttggctaggctggctctgaaattggggatggttcttggttgattatgtggtgtgtgtgtgtgtgtgtgtgtgtgtgtgtgtgtaaaggcccttcttaacattagataggactatctgaatctaagtgaatttaggcacaatctagatattgctcttcatagagaaataatactctaagctggcaatgaaattcctcaagtaaacaacagataaagggaaggagagggacacagtgtaacaataattggaataattggaattcttgtatcactcatggcacttacagtgaaagtactttctacattgtcttctattacatgcaacataggtacattatataaaaagatcctaaaatattgttaaaagaaattttcccagaaaatgtaagataaaagttactaaattctattaagcttgcaagttaaatccaaatcattcattgactcataatcaagaacagtcatgctgcctgacaaccaaaaaattcaaactgtcttcatcaagtcctgggtgggaagccaggaaatgggatctgagatcacaggctttgtgagagtcagggtctttggcgtgattcttggtcacaaatcatgcatttttttccttggagagatagtgggaaagaaaaggctgtttaaaaacatgttaaagaatactgattccatttgacttcttgttaatgtgtacccttgcagacttgggtaaaacttgatcatgttaaaagccattgtacttaaagattcatgactagagtgttaggacaattctgtggccttgggggtcccattgcagcaagaagagtctgactgagaagaggatagctccgtcctttgatgcctagtaacctgcatgcccagcactttgctggctgggccattggtaggaaatgcggtacatgcacttcaatctgtaagagatcatggtccatagagatcatagatttattttgccacctggcccagatggtgatagaagtcaggacaatggttgcctagaggggttgggagtttattagaatgggacacaaagggaaatttctggggtgatggaaatactctatactttcattgggatgattgttacatggacatatccatctgtcaaattcatcaaatggtatgctttagatacatgtatttcattgtatataaattttgcctcaagaaacaaaaactcaaggtcaggtgaaaaaagtccaggagctaatcaaaaacccttaaaataagtgaccaaactatttgtgaaaatgagcagaaacttaaagggaaattctttgttatttttccacattagaggaaaattgatggtatcagataaatgctcaaaaataagcttccaaacagagcatttataatcagtacaataataagtttgaacacagacaaaccttcatgtctcagagtgaaggaaccatttctagtagtataagctattacggagatagttccacatttattttctttcatgtttcttttggaggaataatgtttttgtaaatgtaaaatgcttttaatggagctagagaagaagctatgtttggtcatagtattatctgcttgcgaactaaaaattcagagctctcttgtgaatcatgctgccaagaattgcagacttaagcctcaagattgtacgaatttaaattttgactttatggcctcagttggcatgaagatacaaagataatcttctagcaaaaacagttttgaaagaccgggcgtgatggctcatgcctataatcccagcactttgggaggttgaggcaggtggatcacctgtggtcaggagttcaggaccagcctggccaacatggtgaaatcctgtctcaactaaacatacaaaaaaattagctgggtgtggtggcggacacctgtaatcccagctacttagggaggctgaggcaggagaatcgcttgaacccaggaggcagaggttgcagtgagccgagatcacaccagtgtactccagcctgggtgacaaaagtgaaactctgtctcaaaaaaaaaaaaaaatggtagaatgtcacatggaaagttaacttttagagatagtaatccagacacctataatattacattgtccttttaagtatctatatcaataaattaaccaacatttgttgacttaacatggccagggacagtgctgggttctcataattcccaagtaattctagccagaccttgtcctcaaggagcttatgagcagcatgaggagataaaaaacagataaataactctaattcaggaagaatttgataaatgcatgataactactactagaattcagaggagaggaaattttctttgaatagagactaaaggaaggaataatgaatgtggtagcatttgggctggacctattacaagaggcatgctttcccctgacaagccaagaaagtggggatttaaggtagaagaaaagaaaagccttgagttcttggagtattaaaattttgcttggctgaagcataggttacagtcggaggagatggactaggaaggatcgttatgggcagagaggaagccctgaactcatgggggaagctatgatttgggttaaagacagagctgggtcatgtcaagatggatcctgaagcagtaaaaaaaaatccaagaaagtaaacaggttgcagggtttaggatgaagtccgggaggaaagggcagagtggtccttaggaggccgttaggacaggtaaggtaatgggtctcaaagggagtggccgaaatgcaatggaaaaagagagattgtaaagctagaaggcttaggaattgcctcttgattaggtgtggaaggcaagggaaaatcagccctcgaagaagacagtgagattttaatctgggtggctggagagacagtgatgctggcacagacacgggaagttgagaggaacaccatgtttgagaatggtgactcatatttgaacaagcctgcaatgcccagcagaccgctggaaaagtggggctggagacacattcaacggaggagccagatcaatctttacccttcttcacctgagagagccagtaagtcacggctggaacgtgtgtgtccagcaggagagggtagggagggaagccaagagagctgggagcccaagagtgaagtttttgccaaaggcagaagaggaaagtcggcgtagcacagtatactttcccacccatgctcaccaagcccagggacaaggctcaccaagatgagtttggaagagaatgctggagagaaagtggttaagaaaactgcctttactgaacttcttgggctaactttgattgtaagtctctgaacaatcaaagcctgtgaggagacagccaaccttcttattcttcctatgtcaatagtgaacaattgcagatcccctttcctttccttctcctttcccctgttcctctctcctccctccctgaatactcttgcttttttctgggactggtctagagcatgggtggccattgttgacctacaggaggcaccactgtcaccaacaaagggtaacagtctttcttttcaatatttatttatatccagtatttattttcaatactgactatggagagagctctcctgtgctcaaacactgcaatactgggggtctttcaaagcacaaaaacatatatttgcatgatggcatcattaacatttttatggctttctatttcttttttgtactggtctcaagagccactcataaatctctcagtaactgcatagtgtcccagggccagagaccggccactcctggcattgtgattagagtcatttaatatccaaggtggtgactaatgtctggcaacaaagcctccattgggtgtcatgtgtcctgggaccctgagcgtgggcactctaggagcacctcagtattgcgtgttagtactatggccgagagaatagttgagaaagtggtcaagaggtggatccatgtgaacgccactgggaaatgagagacctcgttcccaatcacggtcagtgcaactcgaaagcctaaaatcagtttaaaacaaaggtatctacctttatcttatgttcatatcctaggcttttaataatacgtatttttcacatgtttacagaaagcagtcaactgagctattcatggaaaggtttgtgggtttggttaacgaagtggaggagtattacatttcagctggaaacacatccctagaatgccaaaacatttattccaaagtctggtttcctggtgcaatcggaggcatggcaatgcctctgttcagagactgggggctagggccagtaaggcatttgatccacatgtatcccagaaggcttttattgttaaattatattctttcggaaaaaccacccatgtcctattttgtaaacttgatatccatacacttttgactggcattctattttagccgtaagactatgattcacagcaagcctgtttttcctcttgcttggggtggcagcagaaagcatagggtactttccagcctccaagggtaggggcaaaggggctggggtttctcctccccagtacagctttctctggctgtgccacactgctccctgtgagcagacagcaagtctcccctcactccccactgccattcatccagcgctgtgcagtagcccagctgcgtgtctgccgggaggggctgccaagtgccctgcctactggctgcttcccgaatccctgccattccacgcacaaacacatccacacactctctctgcctagttcacacactgagccactcgcacatgcgagcacattccttccttccttctcactctctcggcccttgacttctacaagcccatggaacatttctggaaagacgttcttgatccagcagggtaggcttgttttgatttctctctctgtagctttagcattttgagaaagcaacttacctttctggctagtgtctgtatcctagcagggagatgaggattgctgttctccatgggggtatgtgtgtgtctcctttttctttcaggacttgtaggattctttgtgccatttgcatataatttggcaggttcacattttttaagagccctatgaagtgctttttgcatgtgttttaaaaaggcatttgaaaattgaaagtgtgatttatggaaattaaatcatctgtaaaaaattgctttggaaagtaatgattgctggccataaagggaaatatctgcgatgcacctaatgtgtttttaaccctttatttgctgacaatctatagtcattaatgctaaactcgattttggcttcagctacatttgcatattgtccaacaatggtctatttttgtaagaattagataaaatgtatacttgatataaaatagtcaaaaatgtaactcttagtaacagtaagcttggcatttagatagaccatgaacacttcgtcagatactctgttgggtgtttgggatagcaattaaaacaaagtattgatagttgtatcagagtctattaggctgcagcaaaggaagtttattcaaaagtataaactatccaagattatagacgcatgatatacttcacctattttttgtctccttaatatgtatatatatatatatatatatatatatatatatatatatatatacacatatatgtgtgtgtgtatgtgcgtgtgcatgtttaacttttaattcagttaaaaacttttttctatttgtttttcatctggatatttgattctgcatatcctagcccaagtgaaccgagaagatcgagttgtaggactaaaggatagacatgcagaaatgcattttaaaaatctgttagctggaccagaccgacaatgtaacataattgccaaagctttggttcgtgacctgaggttatgtttggtatgaaaaggtcacattttatattcagttttctgaagttttggttgcataaccaacctgtggaaggcatgaacacccatgtgcgccctaaccaaaggtttttctgaatcatccttcacatgagaattcctaatgggaccaagtacagtactgtggtccaacataaacacacaagtcaggctgagagaatctcagaaggttgtggaagggtctatctactttgggagcattttgcagaggaagaaactgaggtcctggcaggttgcattctcctgatggcaaaatgcagctcttcctatatgtataccctgaatctccgcccccttcccctcagatgccccctgtcagttcccccagctgctaaatatagctgtctgtggctggctgcgtatgcaaccgcacaccccattctatctgccctatctcggttacagtgtagtcctccccagggtcatcctatgtacacactacgtatttctagccaacgaggagggggaatcaaacagaaagagagacaaacagagatatatcggagtctggcacggggcacataaggcagcacattagagaaagccggcccctggatccgtctttcgcgtttattttaagcccagtcttccctgggccacctttagcagatcctcgtgcgcccccgccccctggccgtgaaactcagcctctatccagcagcgacgacaagtaaagtaaagttcagggaagctgctctttgggatcgctccaaatcgagttgtgcctggagtgatgtttaagccaatgtcagggcaaggcaacagtccctggccgtcctccagcacctttgtaatgcatatgagctcgggagaccagtacttaaagttggaggcccgggagcccaggagctggcggagggcgttcgtcctgggagctgcacttgctccgtcgggtcgccggcttcaccggaccgcaggctcccggggcagggccggggccagagctcgcgtgtcggcgggacatgcgctgcgtcgcctctaacctcgggctgtgctctttttccaggtggcccgccggtttctgagccttctgccctgcggggacacggtctgcaccctgcccgcggccacggaccatgaccatgaccctccacaccaaagcatccgggatggccctactgcatcagatccaagggaacgagctggagcccctgaaccgtccgcagctcaagatccccctggagcggcccctgggcgaggtgtacctggacagcagcaagcccgccgtgtacaactaccccgagggcgccgcctacgagttcaacgccgcggccgccgccaacgcgcaggtctacggtcagaccggcctcccctacggccccgggtctgaggctgcggcgttcggctccaacggcctggggggtttccccccactcaacagcgtgtctccgagcccgctgatgctactgcacccgccgccgcagctgtcgcctttcctgcagccccacggccagcaggtgccctactacctggagaacgagcccagcggctacacggtgcgcgaggccggcccgccggcattctacaggtacccgcgcccgcgccgcccgtcggggtggccgccgcgcccggcaggagggagggagggagggagggagaagggagagcctagggagctgcgggagccgcgggacgcgcgacccgagggtgcgcgcagggagcccggggcgcgcggcccagcccgggggttctgcgtgcagcccgcgctgcgttcagagtcaagttctctcgccgggcagctgaaaaaaacgtactctccacccacttaccgtccgtgcgagaggcagacccgaaagcccgggcttcctaacaaaacacacgttggaaaaccagacaaagcagcagttatttgtgggggaaaacacctccaggcaaataaacacggggcgctttgagtcacttgggaaggtctcgctcttggcatttaaagttgggggtgtttggagttagcagagctcagcagagttttatttatccttttaatgtttttgtttaatgtgctccccaaatttcctttcatctagactatttgattggaaatatgtcagctatgatgatgactttctgggaagcgattcctgtcacccgctttcccctcctccccaccccacgtcctggggctttagagagcgattgggagttgaatgggtctgatttcggagttagctggctgagtccgcgctggagcggattgctggcatgtgacttctgacagccggaaatttgtaggtgtcccgcgagtttaaaacaagccatatggaagcacaagtgcttaaaaataatctcctgccagcccagtgacaagcctgtcccacccggggagaatgccccggagtggcgtgcgggtcagccagggtctgcgcctcgcagccactgtggaaggagcgcggccggtccaggacacaggagaccactttgtgacttcaatggcgaaggttgtgtgtcctcattttaatttttttccctacaagaattgttctttctccctctcctctccctcccattttctcttgcccagtttctccttttgttttttgttttttgttttcctgatgggcctgcagagggattaggtgggcgcttctggtgaacaccttcctaggtggccacaggacaggtgtaccccggactgggtttggaagcttcagggcgccacatggctgggtcctgaattaggcatttcccaactgtacactggtatccggactggtgtccctatatctttctgccttgtaagccgtggaccagtttttgttcagtattctgtttccagggatatttatagcagaaggaaggggactaaagtgcagtttggccccagaggatactgaagggcagattctgggggtattcagtgtgcatcttcagccgccttggagaaatttagagcatcccacagccacgcagatccaagctgtctttactcaaaagacaaacaatgaacaagacttttaaaggttggcatatttcaaattaattttacttgttttaatttagggttaaaacagagaaaaaggatttcttctgcccacctttttttttttaaatggaagaacaaagtacagcgattaagtctaattccacacaacatttaaaactgcttgatgtgaaggaaggcactggtatgatgtgaattccataaccttatgatggactccagaaaccattttcttccctatttaattttcagttcttttattgcaaattaatgctgctgaatttcaatgggcactaatgagactgctccttggtagattatttactgccttgctaataattacaaagtgaacctggtcaaatacagaggggatcgcatcttattcaaaattgttcatcatcccagtgataagtggtatcagtgtaatatgccctatcttacactttctgcattacatgatattcaaacactcttagaataataaaaaaagagacaaggaacttaaaaattaaaaaaaaaacttgcacaaatgggactctgtgtggaaattcagttttagaatgatttttcctgtgttttatttcccggattatctttcctcttttgttagaattctgcctgttattatccagcaaggaaaagaagcatctatgcaagttcttcatatggacagatattatttagtatttttcccctctcagtttttctgcttaaatgactctgggtataaaggaaaggattgattgggctcttttaggaaactttaagtttcttaagtagttctcaaaagttttggggctgaaagcagtgttttcaaactgcttgtcatgacccagagggtcatgaactcagtttagtgagtctagaatattttttaaaaggactaaaatggaaaggaatataatagaaaatatcagagtgcatggtatttcgtaaggataagttttgtttcctgaaaatctgttttaattatatgtgcttctgtgtgctgattgtgatgtaaaatgtatttcttactgtggattgaattcaaagaaaaaattagaaagctaatggcctaaaatattatatgttcagtagaaaacaaaaaattcaggcaagtggctggttgtttttacctatacaaatcaaaaggctattttgattgtcttcattttccccttataaattaggttggtgtctttagtcatttaggctaagttttactatctgattcttaacttttctattgtagaatggtgctgtcatgtggactgtcctcccgaatgtcccactggatgttcagagaatttatgtgaaggtcacgtcatttagcattgagatgctgtggttaccttcttccatttcttccataatatgcagccacatctatgtgtgaagaaatgtaatagataaaatttctctggacgcataataatgtgagaaagattgtcacatgtcccagcaaattgttattaatataaatttgttacttggcaagctgagattttgcaagatgttactcaaaatttcacaatgaaggaaacagggagtcatcttatcctgggttccttttttagatttcaaacaacttaggaactttgaataaaactaaagatgaagcttaactatatcaactatccttttaaaagttctaattaggaatttaatgctgcatgcttatttcagttttattactcagtattcttaaaagttagacgtctctcacttctccaaaaaacttggcaaatgtataaatcttttgcatcaaaatcaatgccctgctaatttgtatcctggccatctgcatattttggacaactaatttttccactggtgatcatttgaaactctttctcaactttgaatagagactgatttccaaagtgagatttaagtgactaagtttcaagtttccgatacatttttccttttacttagataacatttcagcccccttcctttctgatcttacttttttattaatttaaattgttactgattacgtgacactttgtgctggtctaagaatagtccagagtcacatattccctggtgaatgagcatattttcggatgaaaacggaatcacatcttcaatccccatttcattttcacctcctccatgtggcttgtacctgtttggaagaaagctcctgaaggataattgccacttattctaatctttctcacactcatttaatttggatccctggctaaagttgttatttacttttgtgattatacttagtctatgacattcataatttgggaaaattctcaggtttgagaattttggcggcttgggatttcttttagtttcttatagttttaaggatatgtaagacaggtgtaagaaactgccaaggggaggaaccatagatatcaggaaaaactagaaaagatgccagacttaccattaatgaatgatgagacaatagtaactttgttaagtgagattgtatatgtgaaagtggtatagaaactaaacaaacattaggtgtttttattattttactcacatgttaatatttgttttggtgctttcataggctaaaaagctgggaaataacagatttaagtggtcaggaattttgttataaatatagaatgatgattatatgaaatcttttcctgtgaaagtcaaatttaagtaaaatctttatcaccatctgcaacatttgtctgcagcctggcttaccaggttatcataaagaacatttattttacagatacattaaagaaagtcaaaaccctgattatgtgtaaacaattttacataaggaaatatatgaattttaattatatttttctaaaatccgtactcagcatgaaattaatacatcttaacccctccctgtgacttcattattatttttaatgtaactttagaagaacccagtagagagagcagcgtgctaagtgtgtttctttcttttccagacaactttgaatggagaggagcaaattagtcttttggtttaattctgtctcagtttgcttatctaaagaaaggaaaacagagtggctacacttgtttagaaccatatgcatactccagagaaagatgctctattaatccaaaaaatacagccacttgaaaccagccaaagcgaaagtgtaagggacttcatggaaaggaggcagttcaccaaagttattgaggggttttatattttaaactccgccagtgaattgacgtgtaatgtcacttacaaaaaaaaaaaaaagtatgtctgagctgttcgctacttcgtctctaaaatatactcatactgatctctgaaatcccagaatttaagtgggctggaggttacgggaagcacctttataatatccttaatctcatgagggaagaaaccataattgctgaattctctgccttggataatatcaggagggactctgaagaaagttttgcagtaatcaacaatgttttaaattatgtgtatatttttagatcacctcaaaaaatataggaagcacagaatgacaactattctggtctcaactgacacaattttatgtagtttaataaagtaataatttcaagaaacgtgggcaaataagaaagagtatgactttcttacaacccgcttgtaagtgatgtggtggtggtaatgatccatgattttgatgatgacgatgatgatgaaaatgaagtttttgtctcagtttgggtaggtggtatttctggatgcctcctatggaccctggagatgttcatcctatacagaaatccaatcctttaaatctacttggctcattgttttagaattctaattccatagtctgaaaattttaataatgatattaccaataatattagaaacttattaagtacctataattgctatacaaaaaatttaaaagaacccaaaattccaagcaagactgaaaattttttgtctctcctctgaactatttagagggacaaattagtttgttcttataatatctactttaaataaatgtgccatctttaataagatagtagacttctttgtttggtaatgttctattttttggagatcctatgagttacacttgggaaaattataaaagttcacttaaagttaataaaatccattaagtaatgttcagaactagacatttccaaatgagcccttgaaaagctcaggtgggttctttttgagagttccccaaatgttgtcaaccccaggaggaatggaagacctctgcagttttgttattcagattctcatctccttctcagaagccgtagaactggccgggccctaaggtccacgctccttggttccagttctgtcttccatccttcggtcccgggctcattctgcctgttcctaaacggtggcaagttaggggccccagcagccaacttgtgcttacctggcactacttcctgggcagttttcttggctccttgacttgttgggcggcttgggatttcttttatggccctgaaagcaaaagacaatgttctcttttagtttcctgcaattaaatgatgttagaaatagtcatcttcacattggcgtacttcctctttcttctgtaggtcttttagaattttgagtccattctcatattttcttgtttcatttgctttattttctaatacatagaagtttaaactccctttaaagagtttttggcctcttttaccctattaagctttcttttttcttttctgttttagttgttccatctgtgtattctcagatatttttctttcaccttttctggtttatttctttattgacctgtctcatctgttattttaatgaaatttggaacagggctaaacagagttcctacctcagccagtataagaatataccgtaataactcagagtggtattaactagattaaaagtttcaaaaagtgatgtttttcttgtctctgaggatagaaacttcaacaaaataaagaagaaattttcaattagtagaatttctttgaaagtttgttcattcattcatttggctaccttattccaaattgagtcattcattgagggcttagactatataaagtgtggttttgttttcccagcagttcatgcaacagcattgcacctagcagctgggaagtcttatagcatgaataggtgagattctaataccagaatctcctgcatgtgtaaactaacagtgtagtcttgactgttgtctcccagtaaacttggtttcaggagttttagatccatgtgaacgtgtacaaggcatttttgctaactgtaacttcccacttaatcaacaaaaacaaaaacactcatttctgaacattcagtgcattcatgattaatcttaattacaccacaaaggtatttttcaatggtgattttgcgggagtggggtaacagtttcgaaagcaacattgtcagaaacatagttgattttaaaggttctttctggtgactttgacttctgcttttttagaagaccttacacagagttgtatttatttctcctggaatatttcaagcaattcagagtgaaagggtatacattccaatttgcgtatgagataaaatttagttacattgagaagctattttctttagttacagggaaaaaattgtagggcttttggaagcctctttgatttctaataggaggaatccctgagcactggtccaaacagaaatcatctcttcttcattgctgtatttccctcaagctcttagcaaagtgcatggcacgtgaaagcccggagaagctgttggttgaaagaatggatggtggtgggcaggaagcatcagggacatggtttgcttcagtctattggctgggagaaaggccatttaggaagggatccttagatgccactggaagaatgtgggaagtttgtgaatctctctttctcaggaacaaaagtagaaaaaggactccacacagcattccaagtacagtcggccctcattattcatggattctgtatttgcaaattcgctgacttactgacgtttatttgtaaccttcgagtcaacactcacggtgctttctcagtcctttgcagacgtgtggaatggcaaaaaaatttgagttatatgacgtatatgttcccagctgaggctgagcaaggctcacttctccttgcagccctcagactataaacaagtgtccctcttgctatctacttcgtgttatgatttttgcattttcataatccctgttgatgattttgctgtttaaaatggcccctaagcatggtcctgaagtactgtctagggattctaagacaaggctctgacgtgtcttaagagaaaatacgtgtttgataagctttattcaggcatgagttacaatgctgttggccatgagttcaatgatggtgaatcaacaggatatattaaatacagtgtttttgaacagaaaaacatataaaacaaggttatgtattaatgagttggcaaaaatgctgtgaccaaaggctcccaggaacctaccctattttcccctcaatgcaatggttcagtatttgctaattcagtgtttgaggtgactttatagaacatgagtaccatgaataatgagaatcgattctgtataatagagtgatgaaagcacaggtctgggagccagcagctatatttctattctggcgtgactcctgtgtagttgtcatcactggcaaattgcttaactgtgtgcctcagtttcctaatctgtaaaagctacatcgtttggatgatgtgaggattaaacaaattcatagatgtctagggcttataacattcctggcacataacaagtcattattttttattactacttcggaagggaattgagtactataccctgaagaaggtgagtatgggaattctctacgggtctggaatgtccctatatttgtttattttgccttcaagtgactaactttaataccctattgtgattagaagttaaacttctgcaaccaaaaggaagcaggaagctagtatttcttgaagtgcttattacatgccaggtactgtgctacaaaaacaaaacaaaacaactgtaaaaaaaacttcaaatttggctgcgtgcagctgctcatgcctgtcatcccagcactttgaggaactgaagggaggattgcttgagtccaggagttccagaccagcctgggcaacacagtgagaccctgtctctacaaaaaaacaaaaacaaaaacaaaggcactccaaatcagtaaaaattaatcaatcaataaaaagagtgaggggcattaagtattgtggactgaagcaatcccagagagggaattaattgaagctgaggtaagcagcttatggagaagctatgatgtacagagggcaaggaaggaatttttctgtaatttggaaaaatgggaactgtgagaaagaaggagttggaagctcatacttagggagcatctacaaggacgtctttttcacgttggttggaatatccaaatcaaggattatttcagaatcacccagatgattaaaaaactactgagatccaggttgtatttcagcagttctgacaattgctctgggtcgaagcttgaatcagtagttaagaaaaacaacaaacaaaacaaattttggggcttttctcactgatttacagttaaagctcatttactcttcctatgactttagatggaggatatttccaagtcttcaggatggagacatggagggaagtgagactagtgatgtgcctcaaggttttgctgttgttctaaccatgaggagcactattcaaacccaggtctgctagatttccaagtcttcatttccttgggcctcttggatttcagaagcagagggtaaaaggagtgctggggagaaagatcacagtagctttcaattctactcctcagctttccaaaataagtttcaagactggccgttgcatttgatatggaataaatacaaagaaggtagattgaagggtatgaagatgcagatttttgataccagatatgaagataacattaggaagcaatctaaaacatggacacaaacacacacctgtgccagttagcctgtataattcgatttttgttaagtgtttagataactgaaggtaatttaagccctcatatcttcccttcatagggttctttttccctctggttcatcagagagttgccaccaattcaggctgttagtggtacacataacctctagcattgttgatacagctataaaatcccaaatatcagtacaattgttgattgcataaaatttccagttgcatggttggaaagtcctgtaagtttgaatccttaaaccagtcttaaatgtggaggaggactcaattaaagctctcctcgtgtcctccctctgacgtatttgcaaaatcctttccacaaatagaatactgtttttaatgcttccccagtccaattttgcgttgtagaagacgaatttatggatgagggaagtggcattcaggcactccagcttggtatagaagcccatggtgtctggtcctcagtcctcaagcccgctcatttcctcatgtgaactcagaataagcagctgaaagcaagtcttcaaaatctcagagatatgtataaatgcaagtgtttgggtgagaagtgaacatgggtctcctctagtgcccacactacttgactaacaggttttgggctccacacaatgagggattatcaacccctgtcccagggctctctgggtcttggttctttgtttttgatgctcagcaattgtgatcagtgaaaccaatgttgcttttctatcaagagtccaacccttttctaagaagggttgtgtttgatattagggaatagctagcaaagttatcaagtaacttgtagaaacattcttttgcaagagttcttatactgaatgactgtagttgacagcagtgcagtactggtcattttctaggacatcttaaaaacactgatgagaagtttcctctcagatgtctgtcatgtcattcttgcctttctctacacagggtcagttttctcttattgctgttaggagttcctcattggtttttcagcttttgggctttcaaactctaattaatcataagctactagagtgtactacctaaagtgtgtatatacacatatatacacacacacacacacatatatatacctggtatacatatatatatataatatacatatatcatatatactccccaacctgatctggttcttcctctgcataaaagacctcaggccagtcagagaaaacatgtatgttccatggtgtggcaatcaagcccttgtatttggttccaatcagtctcctaactattactccaagaagctcttgttgaaagagccatgtttaaatggcatgttcctactttcttcttcatagtgatcttcatctgtaccatgtacccttctttcttcttgttccatctctgttaggctgattctacccagaagtcaaggttcagctcaaatgctatccctatcaggtgaattttccacctggcatttgttcggtgtgcattgtgtgcatacagcaccttttcccggtacctttactgtaatcaccagataattcctttcattttagttgtaaatagagttgtcttccccctctatggaatagattttattaatgtatagagcagcagtccccagcctctggaccatggactcgtactggtttggggcctgttaggaactgggccgcacagcaggaggtgagcagtgggcatgcaagtgatgcttcatctgtatttacagctgctccccatcgcttgcattatgcctgagctccgcctcctgtcagatcagcggtagcattagattttcataggaatgcaaaccctactgtgaactgtgtatgtgagggatctgggttcttcttatgagaatctaattcctgatgatctgtcattgtgtcccatcacccccagatgggactgtctagttgcaggaaaacaagttcagggctctcactgaatctacattatggtgagttgcataattatttcattatatgttacagtataatactaatagaaataaagtgcgcaataaatgtgatgcactggaatcatcccaaaaccatccccagttccatctgtggaaaaattgtcttccatgaaaccggtcatggaactggtgccaaaaatgttggggaccactcttataaggcatattagagtaatttcatagatttcctaattcatttatcatattcattcactcagcaagcattactggatgttgatcatgtactggctttggtggtaggtgcagagattgggaacattgtcatcaaggagtttatggttgagtgagggagatgacaagtggatagacaatgaaaaaacagtagaataagaactgtgatagaaaagagacagccaggagcattgaggagaggcacttaaccagatggaggatcttggtccattgatatggaggtcaaaatggtttaatagagcaagtgaccctttcaactgaattttttaagaatgaggatttagccagacaaagaagggcaggtgaggttgtgaagaggaactgagtggtactcttcagagctccagcccagttccttggacagaataaatgcttactaacttatagagctgaatattgaattaataaaataagggtaaactgttaagaatcagagaaataacttaaagaacactgatagctagtgttttttgaacaccatgtacccaggtgccttgccgaaaaccttaatgatcatcttgtttaaaccttacatttctcataagaggctggtactattgttattctcattttatgggacgtagaaactaagacttggagaggggaagtgacttgcccaaggtcatacaaccagtactggagaattagggattctagatctagaatttggactctggagcttaaggttttaacccacgacattatgcagagaaattgacaggatttttctgttgctgatcaatttacttggcagttagtttgttacttccttgtctttattttagttgtgacaatgctttcatcttagactgtgtcccgaggctgctgcttttatttttatgggaaatggctatttttatgatccttgctaaaagcatgtttaaacaattttccattaagtagggggatgtttttccttctaatatcagaagccaataaatgaaattctacaaagacttgctggtagcaaccttaggaatttctttgcatgtgaaacccatctgagaacttaaaatctgggtaaaattgtagtgtaatttggtgcaatcgtctctttgcacaaataacatcataaaatcatagtattgtcatctaggaggggccttagacatgatggaatcctaccttttatattttccaggtgaagaaatcaaagtctagaaaggtgaaggaacttcccccaaagtttcccagctggtagagacagaaccagggctaggtcctctattctgactcctgaccactacctcacacctaatagatggaggcatgcccagttcctgttcaccgagggcatcagaccatgccatactcattgctactgttccagcatttatagtagaagctcaagcaagcaggatgacagaatacctaattctggtcactacaacattataatgatggctaaagtgaatgccccagccatgcttgtctagacaggccatctgtttaattggtatatggttcacgtgagaatttttaacctctgtttgtcgagtcggtgttagttctctagtgatgaattatttcctatacttccatttagattatttactcttaatttaataaccatacattgtttactttggtattgaagattcccttgtttttcttctttttttctgtttccagggcttaaaggttaggagtgaccttgccagacttccctggagacttacactgtctcctttcagatttctgaagcagttgggtgctatttttagtccactatcaccaatgtgaaaatggaacttgcattatttcattatagatatttcactttagtattgacagaattaaaaaaataatttgatctgtgcttgatctagcagccaggttacaatagacatttttagttacctggtccacatgttgaaaaacatgtgtcttctctgagactaatgactaagcccgatgttggttatatactgtttactattaaattttccccttgtagtttaatattgttccaggaaatgaaatgaaagtttaataagaatggcaattgatggacccatatgtcggaagtataactaatgtccccgttacatgtgttaaagaaaggcatggctggtgggttgtaactgtactacaccaagatgatttgacacaacttattctacagagatatatatttatcaggatagaatttataactaaacaaaactatagcattttttcactttgattttttttaaatgagtcaaagaactgctagaattgtcagttaaaaaattttaaaaggagatatgaaaaaatcttacaattcacaatgctgtaaagagataatgtagggattaatatgttcttgatatcaatattttatgacttttatacatgtagaagcaaaacaatttgaggtaggtgaagttagtatggacttcttgagattgtccttcacatttcttttcctttcggtgaaaaattgaaggccaaaatgtattttcttctggttttgaaaatactgtcaagatccttgcaacaaaatgagttcctctaaggagctgaaaacaaagctcactcccctcgtgatactctgagaggctttgctcagcatcctgcattctggtgattccttggagacagatgatgctaaacacaggaagattaggtcaatggtaactttttctaagtcaatatttcttctccttgggagatgatcattttaaatcttcccgaagtccaggctaaacctttctaattgaatctccatgaaggagagctccagcaggtggagaggaagtgagaaagagaaatgaaagctgcacgcctcatgacgctgtgccagggagttcttaaaggtgagggagtttctttttggtaacctaagctatgtgaatcagaaggttcattagcttgtttctttttcttttttgtaaactcctacataattttagtaaacaggaacagtaacctaatgtgatatcccactggcccaagacttagtgcatcttcaaagttgcttaattatgtccgaaacagacttttgtctcttgatgagaaaagcatggttaaacgtgtgatgatttcctattgtcctgagctcagatctgtaattgtggccagattcatgcatctctgctgccttctcttagaagaatcatatgtaggcttgtcagataaaacaggatgcccaggtaaactggaatttcagttaaataacaaataacattttagcatgtcccatgcaatattatactaaaatattatttgttgtttatctgaaattcaaatttaattgaatgtcctgtatttttgttggttacatctggcagccctagccatgctgcctttctgcttaatgggcttaattttttgaaggctggaggttttctgttatggtgcccgtttccacctgcttttctaccaggaaaggaggcatgctgatgtagaatttgcatccttatttttgtcattattattgattataacagatgacataggtttagattaaacctacaatgacattgctgtcattcagataattgtaattattgctaattgtaaagaaggataattttttttgaaatgactattatttgttttttgtttttgtttttgtttttctttttttctaattatactttaaattctagggtacatgtgcacaatgtgcaggtttgttacatatgtatacatgtgccatgttggtgtgctgcacctattaactcatcctttacattaggtatatctcctaatgctatccctcccccctacccccaccccacgacaggtcccggagtgtgatgttccccaccctgtgtccaactgttctcattgttcaattcccacctatgagtgagaacatgcggtgtttggttttttgtccttgggatagtttgctgagaatgatggtttccagcttcatccatgtccctacaaagaacatgaactcatccttttttatggctgcatagtattccatggtgtatatgtgccacattttcttaatccagtctatcattgatggatgtttgggttggttccaagtctttgttattgtgtatagtgccacaataaacatacatgtgcatgtgtctttatagcagcatgatttataatcctttgggtatatacccagtaatgggatggctgggtcaaatggtatttctagttctagatccctgaggaatcgccacactgacttccacaatggttgaactagtttacagtcccaccaacagtgtaaaagtgttcctgtttctccacatcctctccagcacctgttgtttcctgactttttaatgattgccattctaactggtgtgagatgatatctcattgtggttttgatttgcatttctctgatggccagtgatgatgagcattttttcatgtgtctgttggctgcataaatgtcttcttttcagaagtgtctgttcatatccttcgcccacttgttgatggggttgttgttttttttcttgtaaatttgtttgagttctttgtagattctggatattagccctttatcagatgagtagattgcaaaaattttctcccattttgtaggttgcctgttcactctgacggtagtttcttttgctgtgcagaagctctttcgtttaattagatcccatttgtcaattttggcttttgttgccattgcttttggtgctttggacatgaagtccttgcccatacctatgtcctgaatggtattgcctgggttttcttctagggtttttatggttttaggtctaacatttaagaagaaggatacttaaagtataagggaaaatgttacaatgtatgaagggaacatgaagaaatagaatctggtaaaaaagagttcttgcttttgggaggccaaggcctcctggctaacatgatgaaacctcatctctactaaaaatacaaaaaattagccgggcgtggtggcacacgcctgcagtcccagctgcttgggaggctgaggcaggagaaccacttgaacccaggaggtgtaggttgcagtgagccaagcttgcaccactgcactccaggctgggcaacagagcgagactccatctcaaaaaaaaaaagaaaaaaaagagttcttgctttcaaaactatggattaggtaacttttgtgaatgagtaagatcatgagtattataaaaatagcacctttcttttttgtcttggggaaattatcttattttttaattggatttcagaaaagagtatttcagagaaataaatctctgaaatgctttttgaagtgtgaaagatttagaagacaaaagcaaacctcctgtctagataaacattaaagagatctgccctcccctcctctacctattcaggttgcaacactttgggggtggctgccttggtagagcttgatcgtgactctggtggcttgggagatggcatgctgcacaagggattcatggttacagcgggcttgtgggactggggctctccaatacgtggttgggtttgtaaagaaatcagagctatggtgtgaacaaaaggatatgcatgggagacagtgagacaaggaaatgctccagaaattattggaatataggtcagataactaactgtacttgtgccattttctgggggaaaattctctgaaggctttttgggaaaagaatggaagtgagaattctcaggtcctcaaaatatttccttttactcagtcctaacctgaggccgttaaagaattcccagagtcacgatggaaggcatgtttgggagtaagagccagagtgagggttagaaatgtgttgttggccaggtatggtggatcatgcctgtaatcccagcactttgggaggccaaggcaggtggaccacctgaggtcaggagtttgagaccagcctggccaaaatggagaaacctcgtctctaccaaaaatacaaaaattagccaagtgtggtgacacgtgcctgtaatcgagctcttcgggaggctgagacaggagaatcacttggacccaggaggtggaggttgcagtgagccaagatcatgccactgcactccagcctgggtggcagagcaagactccatctcaaaaaaaaaaaaaaaaaaaaagaaagaaatgtgttttccagggttctgggtacttaggaatttggttgcttttgcaggtggaagtggaggtgactaggtaacagctgagtgattttgccccagttggacatgagccaggttgagcagaaagccctgggatgcggggaggggggtggcggggaaggaattgaaagttggttgtgtggtttggctttggcttcatggcatgctcacaccttgcttcgcatagcatgcttagactacagcaggagcatcaggaagtggatttctgagctcaatacaaaaagttataaataccacctataagggcaataaagatatatagttgattttcttctttgcaaggccaaatcttataggaacataagagcgaatgagttacagcctgggaatttgagccttatattcagagattttaggttgcttctgattccgctgtctagacaaaaccatgagaggatagtgtctagaaatgagaggaagctcttccaatgcagaggctagaatgtgtcagcctgtgctgcgaggcctgggatagatgtttctgaaaagtaaaagggcagctttcctactggatacttgatcctcaggctctagaaaactctgctttattaactttgttgacttcctaggcaccacatgggatccttgttcttcctccttgtaagcagtaattgaaatcagtttggcagcctggtttacagtgaccatggtggcttgtctcccgtgctcttacctcactctgttgatgttgtaaaacctccagctaacttcatggggtggctgacccacgttgctcatttattcattcaacacatattcattgaccatctactctatgccaggtattgttatcagcactgggaatagatcagtgaactattgatctatttgtctaatgggacaaattgacaaattgggaaagattccattacacaggtgacatttaagcaaagtcttgaataagggagggaatagtaccatgagatatcctggtgaaaagcaatttaggctgagggcacagcagggaagaggccctgatgtgggaacatccctggtgtcttgaggtacagaggccagcatggctggcacggagtaagaagttggaggtgccgggcatggtgactcacacctgtaatcccagcactttgggtggctgaggcagatgggtcacctgagcccaggagcttgagaccagcctgggcaacatggtgagaccccatctctacaaaaaaatacaaagaaaattagccagatgtggtagcatgcatctgtagtcccaattgcttgggaggctgagatgggaggatcaaattacttgggaggctgagatgggaggatcacttgagtccaggaggtggaggttgcagtgagctgagatcatgtcagggtgacagagcgagaccctgtctcaaaaaaaaaaaaaaagaaaaagaaaaaagaaaaaaaaagaagttggaggtgagtaaggagaggaacgtgggggacagagtcctcaggactctggcttttactctgagtgagtcgaaaatccaattaaaggtttgaaagagaggaatgacctgatctgacattttattgtgaacgttttcaaatctttacagaagtggaagagcataacgatccttcatgtacacatcgcccagcttcaactatgatgtttcatttgtaaatatttccgtctacacttccaaaggatgatgactatttttaaaagtccaactataataccattatattttaaaagttaaaacactatgtctttaaatatcaagagtttgtattgattcgcactttgaaggtcgagctgatgaaatttcctgaggggttggatgtgacatgagagaggagtcaagtattgcatggtaattaaaaacctttgcagcatagtccatttaccgaaagactatatgtatgcacttcaaagcaggttttaaagattaacatcaagcatctggcttcatgagttttaacttcttttcataaatgttatacaatgtcatcatctctccagctagagaaaatgctattattcttattttcaaatgaggaaaatgacgcagaattatttacatattatgtaacttggtcccaagtcccttagatactggtttagaaaatcctagtaaactggaagtgacttatccaaaattaaaatttattttgctctattgtcttttgttgcctatgggaactttgtgcaggtaactaggcacatgtcaggactgatttactgacctctcaaggtatctttaattattttgggggatatcacggaatgagttctacacaattcatttgaatcgaattgaacttaagaaaattcaaatgatgcattggctgcctcctatttattacatgctgctcataggcataacagcatagtctaacaagtataaaacctgtgtaactgtagctttcagtgcagtgtgatgagggctgagaagatagtggtacaaagaagagaggtagcagagtgaagctgagtcaatatgatgaagatttctctagacttgaaagggctagaaaaggttattcttggcaggaaaaaaacatgagccaaggcataaggataagcacaggcatggcagatttgggaatgtcatgtaatttgttgctgggctgcaaagtacatggaaggggagtgaaggaacagaaggagatgaatctggagggagaggttaaagtgttccagagagcaatatgtaggtgttactctaagtcaaagaggtcgtaatagcatgtccagactccaaaactctaaacaagtcatagaattgctgccttggtagggcatatcacacacatcaacccaatcctctgtcaccatgacatccatataactgcaactctatacatttcccagcctatgttcccagagtctccagatgacattgtctgcaaactgcactgcagaaggctctgctatgtcttcttaaaagtaagcaagactgttttcctttgttacatgagcagcaaaaggatagggtgctctttgacctcacttactgtagggtggataggaaagtcaaggaagagtaacccagaagatttagttttaactttcgcatcaaagaggtcccttagcatctgctcagagatgtcacaatttctggtgtgtgattatgtttaagaattcggccttgccactgttgaagttgttctgtggaaaaagaacctctcttaattttacatgatgcccaacttctcttttattccagaatcactcatatgctgttggactctttccagccatgtgtgctaacctaggcaatgtcataatagatgaattatgtttactttgtctttgatatctcagctcttttatcttctattcaagttcccacctccatcattactgatagtgttcgttgaacaaagaatatgtcagatatacagaagtgtttctccccttttctctgtctctcttttccttcctttcctttagtttcctttctctgtctgttttctgatgcctcattttagaaaagtgattttttttgtgggaaaatcattttagcattagaaacgcaatggctatcactgacagcttcctctgatgaaacggccatttgtcatcattacacggtcatgggagtgctaagaagacttaaatgcagggctaccaccccttcccaattcatcttttatccattttatttctctaaggaaagggtttgaaaaatgggctttgccctcttggatgcagtgaagaaattctagctggctacagatgttattgttggtcggaggcaagggataaaatcatggtcacaccattgtagcgccagatggggaatgtagcaaacatagttgtaatttctcattttacagatgaagaaactgaggtgcagaggggttcggtgacttgtttaaggcatgtaattgttattggcagctttctgttcagaacttaagagtatgagtcagtctagatcttttcatcacaatactctgctcctcttactttttcctgaaatttgtcacattgacagcaatgtgatccctaatgacacacagattcccaaataatttttgtagtaaaaatttccatttgcaattctggacatgtgtgtgtgtggaattttatgtgatgacatattggtcctatcttttgaataggatcataaatgaaatgacttatggatcacattcaaaagcaggccaggggccaatgtgtaagcaggtgggttttcatatttggagttctgtacttttgtgttagtcagtgggtctaggactcttgtagtgtatttcccaagggccaaagtcttctgccttgaggtgtcagctttccaaggcagaggctggatgctttctcttccttctgggctcctttctcttaggcttcccccttctcttctcctccatttgtatctgtcctttttctcggtactttccctggctggtctcagctagatgctcactcaatgctgttgaataaatgaatgaatttcgtagtaattctgcaggtaaatcaagttattgtctcccaatacggtgctatgctttctgaggaaattagactggaagtcaggctttttaaaaaagaagatgtggtgtcaaattgcagctctctctctctctcgacttaccttttttctatcatccatatgccttctttcttgtatctttgggttcccagacctcaccattcattagcacttggaatggattggtaagaataaagaaaggagaggtggtgaaactcagcttgggtcatctggttacacattagtaactgacaaaagataaaaagatacagactaaatgggtttttagggaactttttccagtctattcttgtttcccattagtgtgaaaaatcaacacttgcttgtattttggggtgaagacatttttcttaagtgagtgggaaagcctcttgacattttaccgagagccttaaattttgaatggtgaatgctaatgttctttgtgcataaagaatttcagaacttgtatatatgagcattaatgatgcatcattttctatttgtgagttaaactaggtattatctgtaatcatatttttaggaaacattcaaactttcatcaagtcattctcttatatgactctcagctccattaactctgttttcatggaactcaacagagttcttaacgtttgcattataaattaaattagcatttcccctcaaagaagtattgctgtccttacaataaataattgtagacaatttcttttcttttcttttttttttttttgagacaggttctctctctgtcacccatgctggagtgcagtggcacagtcacagctcactgcagccttgacctcctgggctcaagcaatcttcccacctcaacctcctgagtagctagaattataggtgcacaccagacctggctaatgtttaaattttttgtagagttggggtcttgctatgttgcccaggctggtctctaactcttgggctgaagcattcctcccaccgcagccttccagagcagtgagattacaggtgtgagctaccatgcccagctaattgcaggtgatttctaatgggatttagtatttctgggtttaaggatgagatctgaggtaatgactttgtttccagatgtgaaataatttgctcttgggttgtgagccctttgggtgggctcccaaggatcctgctctcttccaggagcccaggctctggggtcagactgcctgggtccttgactccctgttttctgattgtacaactttggtgagtggcctaattcctctgtgccttggctaccttggttactatttctaaaacaactggtgttgtagtagtactgcttagagtactttcaagggttaaatgaattaatccatgtaaaacgcttaaaatagtgcctgccacaaccatcaatttagtgtgaaaatctgctcacctgcttggccagcccctttcactttattaaaccaagggtcgtgctgggttttccagaagtctaagttgcggtctaatctttgtgcagaagctgaaatagcagccataacgttctccctagatgatttcgtggagcttctttgaactgtatctatctccagtcatttttgtggaagaaattttcttctgtactttttagggatgagaattacctgccttggtttattaactaaaagacaccatgattacaaataaaattaaataaatattgtatcactaaatagataatatgagatagatgtattaagttttcagataaacagtataaaagagctagagtaatttgtaaaaagttgggaggacctattttgtcatgcaggaaacaatttttaacttgcctaccccagaacatagctaccacatggttagggtttgcccaaacctggcccaggagtcatttaccttgagctttcctaaaaaggaggatcaggattttcctctccagactctatcattttaggtagagtccttcttgtcaattctttttaagaacatacatttacttttgtggaaaataaatagatacaaaataaatacatacaaaattgcatagcaattagaaatacccaggaggtatgttatggtcacagacacaaactgcctccaacttctgtccatccatagtgatatttaaagcagagagaggtacacaggtaaccacatttagatggactgggatgttgccacacatacaagcattgataactggcttctcattacctgaatacattcttctgtcagagcaacagactcagctatgcttctggcaaaattgttcttaattctctattgattaatttattcggtaagtatttattgggtattttctgtctgaaaagtgcgattccaggtgctttatgtgtctctgtgtgtgggtgttatataaatacttataatactgtatccatactcttgaaaagcttagttgggaaggcaaggcatgcaataaggaacacagaattttagtcattccacaaccatctgttgaatggctgctattgttagtatcgtggtggaaactgagaagcaaagatgactataataggatctcttttctggagatgcacagtggacacgtagttatatgatgatgataaggactccagaatagttctatacatgatgctctggggccacatgcagattctgatgagaaacaattaactctttttggctgctacctgagaaggggtaattgtcactcaggaggtttttgccttttgaccaacatagaaaggagtgtgagtgaaggctagaggtgtactaacttggtcagggcagggtgacacataaaattaaccatcacagggaagggtagggctggagaggcagactgtggccaggttacaatgcgctgaggctaaggagactgtgtttatcctgtaggccagtgggtcttactctgaagtcttttgggtgggacattcatggacttcaagagacctgtgaatgccctaagattataagtaaaatctgtgagtctgtaactaaagctaaagctatttttctggggcccaccatctaaagaagattctgaagccttagggtagccgtggaggagacatgaaggtccattttgcatggtagaaccctgcctggctcttgctgcagtgtgggaggacaggtttgcaatgtggaggtgtggcaggcatggatttgggaggattggcagaggactcaccatgtccatacactcactgagatggcaaatatttattaatcatccaactgtgtatcagacactaagaataagctgggaggccatggcaagtgaggtcaccacagtccctgccacagtggaggttatggtatacaggtaaggcagggaagagcactgcaaagggtttgcccattgcatcagtcatttatttatgcacatgttgattcaacaattatttctatgccaagctgtcttcaaggtgctggaggaaatgaagcgtacatttcactggggaagacagacaataagtaaacacattaaaatctggcttggcttgatgttggggaggggtgagtgccatagagaaaacaaaccatttatgcagccaacaaacatatgaaaaaaatctcatcatcactggccattagagaaatgcaaatcaaaaccacaatgatataccatctcacgccagttagaatggtgatcattaaaaagtcaggaaacaacagatgctggagaggatgtggagaaataggaacacttttacactgttggtgggagtgtaaattagttcagccattgtggaagacagtgtgatgatccctcaaggatctagaaccagaaataccatttggcccagcaatcccattactggctatatacctaaaggattataaatcattctactagaaagacacatgcacacgtatgtttattgcagcattgttcacaatagcaaagacttggaaccaacccaaatgcccatcaatgatagactggataaagaaaatgtggcacatatacaccatggaatactatgcagacataaaaaaggatgaagtaatgtcctttgcagggacatgggtgaagctggaaaccatcattctcagcaaactaacacaggaacagaaaaccacacactgcatgttctcactggtaagtggaaattgaacaatgagaacacatggacacagggacgggaacattacacacctggggtctatcagggggttgggggctaagggagtgatagcattaggagaaataccaaatgtagatgacgggctgatgggtgcagcaaaccaccatggcacgtgtatacctatgtaacaaacttgcacattctgcacatgtatcccagaacttaaagtataattaaaaaaaaaagaaaagaaaacaaaccagtgtaagaggatggaaagtaataggctcgtttagaatggtgtgagaaagccaggcagggagaaggcgctgagacagggaggtcctggatgtgtttgtggaagagctgtggcagcacctggaacttggggagcaagggaaggagtgtgggcaggcaagggtgagggtgcagggggtcatgctgggccttccaggtcacggaaggacttgagctttactcttgttgtggtgagaagctgctgagggcttggagttaggggagtgaaaagatctctactataatagggagagttcgggatctgtaacttaaccccaggagccagcaaagctccctggaggaaatgcagtttaagctgagaatgggaggataaacaggtgtttttcagagaagaggaagggtgctctaggcacagagaacaacatgctggaatgcttctactagatcataggggcaaaatgggagtgcaggagtaggagagggctttctgggaaagatacttattttaattttgcatgcattgagtttttgaggtttctttggtttgttcatgtggaggtgcagagtgggtatttagcacataggtctgaagtccaggggaggggtgtgggacagcagttggatgtggcagagattccacaaagagcaaatatcatctgagaatggcagagggctgagggcagagccctgaggaacactggtgtttaggagcctgctggagaaagaaaatactgcaaagggaacggaagtggagtggttgccagacatagaagctagtgtctaactagatgtcatgagatgtggggaaggtgttacgtatctaagaatgcaaagttgaacccctgtgaactgtaatacttaagataagtcgtataaattgtctggaactagagcttgattttccaggagagatgaaatgtgtgtaggtgacaggaaacaatgaatatgtgggcgagtgtagtgtgagcaatttctcagaggtgaatttgacagcattttgcttaggaagctacaaagagaccaatgctagttggtgcaaggaattcaagaatttggacttaagtctatataatgatgattttttttttttaacttgagtttcccggtttatcactcccagaatataggcagaagtttgagatttttatgtgtattttctggaaaagatagtttcagtgttttttacattctcaaacaggtttatgatccaaagaaaaggcagtggtcacagatacatgaaacgacaaggtattcaaaggagaacgttgtactttatgacagttctttgggcagtggcttgcaggatgagtttgaggaatgattggaggcaggagagtaattctagtaattcaaatgtggagtattgttgatctctcagacacaaatggaaaaacaaggaattcaaagaaagataggcagagtgttttgaagaaataattgatgaaatttggtaatgagttagatgtaggagatatatttagcaaatatttattaaggactgtattaatctgttatcatgctgctaataaagacataccaagactgggtaaattataaagaaaaagagatttaatggactcacagtgccacgtggttggggaggcctcacaatcatggcataaagcaaaggaggaacaaagtcacgtcttacatggcaatagagtgtgtgcaagggaactgccatttataaaaccatcagatttcatgagaaatattcactatcatgagaacagcacagacaaaagcctgccaccatgatttaattacctcccactgagttcccccaggacacatggaattatggaagctacaattcaagataagatttaggtggggatacagccaaaccatatcaaggacctactgtatatggttaaaattgggagcaaatgagacatgattcttgccttcttggagtttactgtttactaggggaacatacacttgtcaataatcacccaaatataggattggaaattgtggtaagtgccatgaaaaacaagtatagggaattttgagtgtacatagctttggggacttgatttgatgagggagccttatgaagttattgcactagaactgaattaaaccacatttctaggaagtggacatctatttgttggttctttaaatttagctttacagaaatatttcctttaaaaaccaaggcttcttaaatttttaaaactgcttggctaatcaggggaataatgcttttggatagctggtatcgttatttatggttggaaaaacaacagtatttgattacattgagctttaaacttttcctttgattaatgaaaattttattggcccatagtttttattatgctctgtttttacttggtccaagagattctattctctggacccaatatgaataccttcagacatccctctttttttttttttttttcacccaggctggagtgcactggcacgatctaggctcactgcaacctctgcctcctgtgttcaagcaattctctgcctcagcctcccgagtagctgggattacaggcacctgccaccacacctggcttatttttgtatttttaccagagatggggtttcaccatctcggccaggctggtcttgaactcctgacctcatgattcacccaccttggtctcctaaagtgctgggattacaggcatgagccaccacacccagcccagacatccctcttaattatgttgaatatgtaatatcggtgatttcatttgaaaatatttagtagtcgaactagatcaaggcagttaagcttcctatttccatagatgcagtggtattgtgtcttttttatatgatctctcatgcttctggacatccttttttctgctattcttcattccttagctacacttggtgcttcgtggttgtaatgcattgtcatagatgcgttcatttctcattcgatcttcagctctatttctttccagagaatctctacaggcatctgttaggttgaaggacatctaatgtcttaatgtgtagcttggtaaaccagtcaactttctatctgagtcttaagagaaagtgtccaagatgagaaacggtacaggtttggtgacaactcagtgagaaaaagaagaattttacaaggaaggaggtatcttagtaattttgctaaagaagtaggtaaaccttcacttataataaagggatagggctcggttagggtttgtgaagtctccccttaggaaagcaaaccctgaaatattttgaatcttttaaagaaggaaaataagagtcttttaaataaatttttaaaatttattttatatattttttatagacaggctctcactctgtctcccaggctggaatgcagtggtgcaatcatagctcactgcagccttgaatgcctgggctcaagcggtccttctgtcccagcctcctgagtagctgggactgcaggcatgagccaatgtgcccagcaagagacattcattttggtactgtgatggtacagaaaaacaaagggcctttgaggccgaaggagcagaagaaggatggacttagacatggtataggcactttctactaaagagctgtgaagctaaaaatgccaggtctatgacaggtgcagtgggccaaggccaggtagagagcagcaggaagagaggaggtggggacctgtacctaggcccatctgctgggactgatctagccataggtactcagagaagcccagattggtgcctgacccacccttatggcccagacatggacacctcccagtctgttccttcctgctgcccatggatgggctgtgttagtctgtattctgaggacacagctctctgtctagaggaagttatgttatcttgatctgatggatactcaacgtgaacattatttcaacgtgccacagggtcttggagcccagaggaagaccgctcttgccttttagtttatattctttgtttttttttaaataacattttgacagtctttatggagtaagtctgggccaaaatgataattgacaatgttatttacatggatttctaagttggctaaaaaagttcctttatggttagtgaatatagcccatgtagtttccccgtcttctttagatgccttctatttctatgcccaaagtctgcagttgattttcagtaagctgggggtcatcttagagataaaatgtagatgaatggcattttgctgacagcatacatctttgctatttctgaggaaaatgggctctcgctattaaatcttttgtcaatatttataaaaatagtatttacatattctatctatattgtggaaactatacatttattgattcagtcatttgatatcaatgttgttgagtccctattccaagtgaggcactatgctctaagcacatggcattttaaagatgaataagacaccaagaactttgcagatagtaatggaaatgagaattaatcaattgaagattaatatagtaagtagcagaagagaaataaaaaaatcttctagagagttcagaacagggatgttgattcaagtttatggggattaggagtggctggtaagggaggcattcaggcaaaagacataaaaatgcagtattcccctcgcactcattaggatggctactatattagaaaaagaagagagtaagtgttggagaggatatagagcaaatagaaaccttgtgccttgttcatgagaatgtaaaatggtgcagccactgtggaaaacactggtgattcctcaaaaaatcaaaatagaattatcatatgatccagtaattctacttctgggtatatatctaaaagaattaaaaatctgggtcttgaagaaatatttgtatactcatagttatagcaacattattcataatagccaaaaagtagaagcaatccagatgtctatagatggatgaatgggtaaacaaagtctgtgtagtatatacagacaatggcatattagtcacatcatggaccttcaggacattatcctaagtgaaatatgctagacacaaaaagcaaaagtagggtttcacttaatgaggtatctagaattgccacattcacagagaacaaaagtagattggtggctgctaggggataggggaaggagaaaatggggaattattgttgaatgggtatggagtttcagttttgtgaaatgaaaatgttctgaagactggttgcacgatgatgtgagtatatctaacatgattgaattgatgaacacttaagcgtggttacgatggtaaattttgtgttatatatatcttaccacaatttaaaaaatatagcattttattatgtaggcgtgggtgggaagatacttgacacattggaacttctggccatgcgtatactgttcactcacttattccttcattcattcaacaaacatgtattgaatgcttgctatgtgctgggcactgagctagatataacaattaataaggcttataagacattgaatctatcaatttcatgcttgctaaatatctactcccacctccaaaggcactaagcttctacagttagatattcatagctgcttcctactgacttgaatcatgcataggatattagtaaacaagcaataaaaagatttgaggttgatgggggtgggttcaacagcatggtggtgaaatggaaagagatgggtaacagaatatgaactagaattgaaaactgtgagccagtgctctctaatgaacattaaaaaataaagaattcctatttgaggctgccaacctcagaactaagttatttagaatggacgaaattggcaaagtcagacgtactcaacccaaggagccaatattttgtgaatattatggcaaatgtagtttgagaaccactaccacaaaattgtgaaccataataatgactgagaaggcagggagaggttatacaatttgggctaaaaggaaagacagggcttgtgaaggggagcgccagtgaaagtcagtgtggttcgggtatttgggtggggactggaagcaggaagcttgagcttcctttgccaagagaccctgctggaagggctatcatcaattgactttagctcatcttaggattttcattttttaaaaaatgttcacaggaaccttcactccatctatactttcaatgtctgcctacctttctttcttatacaactttgaacactctctccattcatttaaatatattatggagtgccaactacatgccaggtactgtgctgggctcttattccacctttatttgattgcacatgcctgccaagtcctgggccaatataacatctactcctatgtctggtctggcgagagatgcaaactcatcttcctctactttccttacctccttccttccagtcttcttcaagttgtcttcattgaggcaatttcttttacctgtgtttttaatcccaactcctctagtttccttcttggctttattcttttatcttcctctttgtgctttcaaacattccctttctcctggcccatgcccttcagtctacacgaggccttctcaagtctcttcattctaaaaaattcattttcttgggtcttatattcttcagctgccaccctatctgtatcttttcctattctcctccaagttctcaaaggaatgccttccctcattttcatctccttacattccatctgctgaattttggcttgtgcctgtacctgtctaaggaaactccttgctaagagtctgctttgtcaggtctgaattcacttaaccagtctttgctttgttggacttctctgccccatttgccattcttgatcatcctctccataaacctttctacttaaagcattttacttccttattttcttggttttcctagaatctccttactgttcattttcagcttcctttctgtgttcctcttctcttcctacatttttttttagctttctactttcttaaagcattttacttccttattttcttggttttcctagaattttcttactgttcattttcagtttcctttctgtgttcctctgattgtctctctttctacattttttttttctgtgttcctctgattttcacgcagtctggagttgtcatgatcaatcatagcctactgcagcctcgacatcctaggctcaagtgattctcccacctcagccttacaagtagctaggactacagtcacacatcaccattctcagctaatttttttaagaagcatttttatagagatggagtcttgctatattgtgcaggctgggctcaaactacagggcttaaacaattctcctgctttggcctcccaaagtgctgggattccaggcatgaaccaccatgctcagtctctacatgttcctaaagaggagttttgaatattgaagaacagtattttcaaattacattattcaagttataaaaactgatatccagggttatgtggcaatgacgtaaaaatttgaattgttatttttttgacacatgttctgtgttgtccatcagttcatctgagttccaaatgtcccagctgttttatgctttgtctctgtttcccagagaccctgagtgtggtctagagttgggatgagcattggtctctaatggttctgaaataattgtatattcctgcaaaaacattaagtctattagaaaccagctaatttcattttgtcatttttataggtaacatattctggtgcaggtagtatgtttttaaaacaagtttgcaataaacaatttcccctcaaggttaatataataggcaacaccttttgctgcaacagacggcaagaggtaatgaaagattagcttacattatgattcattatttcaaaatgtcaggataaagtggatctgctgcatctcccagagagtgcatgttttgcttttctaatgttaatggatttactgtttttttccccccaggccaaattcagataatcgacgccagggtggcagagaaagattggccagtaccaatgacaagggaagtatggctatggaatctgccaaggagactcgctactgtgcagtgtgcaatgactatgcttcaggctaccattatggagtctggtcctgtgagggctgcaaggccttcttcaagagaagtattcaaggtaatagtgtgttgaaaacgacttctatttttgatcctatgagcagatcctaagagccaaagcgactgaggaaggaagacatagaatcagccatttgtacaaaacatgaatccctagtaggtccactagtatctttggtagaaacatggagaagagacaggatctcaggagaaggagttgacacatggcagggcagctgaggctgagtaattccgcttccttcctttggcaagactcaatcagtcttgagcaactctacagaagaattccactagctggatctctgaggaaaaaagaaatgttgtctgtgccctgactggggaatgccagatggacattcatgtttggtaggcaactttgcctatatgatctggtatatgctgttaattgtccatgcataattatctctctactcaggccttgtccaggcaaatattctgttttgttctagtttagcttgttctcccctttctctcttccatctctttcttgtctcaatggatgacaggatattttgctatgagctgactcagtggttggtgtcttgtaatggggagatatcatctttatcaaacagttattaagtatctacctgtagcatttcattttcccgcctgcctccattgttttcttgtctatagtttgccaattatagctaatatacggagagctatactttatttctactccagaaatgtctctattattgcattataataggataccctggggaaacactaatcatttttactacctaaaatacctatgctgaatatcctttatctgataggaacagagatctgacagcagcttaggctaaccaaattcattttttatcttaagtgtggggcatttttctctcttcttattctttaccttttcagcttaagtgaaggttagtataaacactaagaatatttctgatggagttttcatgtgattccttctacaaaaacccagatttaagtaacttgttgaaaaccagagtccgctaagttaataaacactgattgaagaagtgattctcatggactttctgtgatagctctttcctgccctgatatgagatgaaagctgggggatggtatatagtatttatttttccttccgttgccagtgggactttttttttttttttaaaagctgttcatatcttaatcgagtagcatgtgaggtcaacatggtctattttaaaagcattttcttcgacacattgcttttaacatcttttagaactctgctgtgagacacatggacttttttgttggtatttttatacaattaatgatattctcaatagtaatctttgtgtgtgtatatatatagaaataaattctaaatgtaagttaatatatttattatttttctaaacatatataaatatatatatgcacacaggctatttaattttattagatgatgctattttaattcagaaaaaaatgacatttatattttgatttaggttagtataagcccttagaggtgttttgacaactctcttaatttgtggttttactgtttatttgattttatataatctaaaataccattgtttttaccaagcatttaatttggcagtgaaagagcgtctgacagaggtatggttagtagataggtctaactgcacaactggatggattgagctgagactgtttcctcatcagtaaaaatgatttgaagcagtggttggcaaagtttttctgtaaagggccagataataatattttaggctttacaagggccatgcagtctctgttgcagctaccgaactggattatagcctgtaaggtgacctgtaaacacatggaagtgattatgtgctaataaaactttatttatcagaataggtaacagatcagccctggcccgtggccgatccctgatttaatgtttatttatctgatctaaatacctttatttatggaagggaataggggatttttaaatctaaagttttgattattcacattttactgagaacttactctatacctgattagatgttccgagagaaataaaaaaaaagtgtaagacataatccataataccacaaaatttaaaatgtatttaggaaatttatttgaggaagtaaatgtacttgttctcatgatacaatcagaaagtaagtcagtattgataaagtgttacctgtatgagaaagataaggaaaacaatagagagatgtaagaaatgaaaataccagttataaattaaaattattaagattgaaagtggaaatgatcttcctccgagaaacaatggcaatattctcacaaattttttacatcatttttgttcagcatttaagataaaattatataaattcccataacatttagtattgtctctaagcattaagaacagaaaaaacagaaggaaaatatatttctaaaaatcaacgaatacagtgtgagatgtttcattggtatggcattatctcaagttcaaacattttgaaaaatgtctgcttactctttgatagttaaaaacaagtatctcagctggcgtggtggctcaggcctgtaaccccagcagtttgggaggctgaggcgagtggatcacaaggtcaggagatcgagaccatcctggccaacatggtgaaaccccatctctactaaaaatatgaaaattagctgagcgtggtggtgcacacctgtagtcccagctacttgggaggctgaggcaggataattgcttgaacctgggaggcagaggttgcagtgagctgagatcatgccactgccgtccagcctggtgacagagtgagactccatctcaaaaaacaaacaaaacaacaccaccaccactaacaaaaacctcttatcgccgtcttgtatacgcagaccagctagtagaattttactgaaacagtagcctataaaaatgcaattccacttggtttcagaaacttcttgtgtatcatagtgtgaagtcacttatcttaggcttttaaaatgggataaatattgagtccaaagttctggaagaagcctagaaagaaggcagagttattaacttttagatatagggaggaaccttaaaattattcagttcttcattcattcacttattcattgactagctttactaacaaagccctatgcaagaccctggaaatgcaatgatagaaaaacctggtccctaccctcacagaacttgtgaggtaaagggggatacagactgataaaccagcaattagatgatggtgtcaagatagaggtgaaggcagtgtcttataggatccaaactccactcagtcctggtggtggttgagtctggctatcagaggtttcctgattaaatctggagggtgagtcaagggagcatggtgaagaaggagggaatgcatgtttagccatgtgaatgagtccatgagtgaagaccaggaggaaaggcagagcgcggggaattctatgcgtaatatttaacaaaattaatgtactgttaaacaaagacatttctgggccatggatttaatcctagactgtgtaaaaaccaagtaattgatttcctttatactttaaaagcatttccatgtatttgatttgtttgtgtgtataaaagggaaataccacaacaagtttaagggtttctagttctgctttctcatcatagtcttgataacttggaactaaaaagtttttgctgaaattgtctgtgactctttataaatcacactgcccctcaaacacatttaaggatggtgaagggtctgacacgtaggtgggaagttctgaagatgccgcagctctccctgttttccttgttacttaagaagagagctagaaatgagtgtacatcagattattctcatgttctaagtgttttggttgaagaggtaaagtgtttggcttgaaagcatacaaattttcatccactacttagtgtacaaacttgattacttaagagattgagtaatggcctccagtgaaacgcattctttttaaaaagcaaagtgaaggatgctatttaagtcagaaggggcaaaattggatattttatgagtttattaatcattgcaggcatagaagtagtgttccttaagatgtgttttagacagagtccctgggatgagttatataagcagatctggttgtagcttcagcagccagatactacctttgagtattacttcaaggaaaaaggactccactgagctcactgcttctctttcattattatttcagaaggttgtgtggcgtagagggggctcaggcctacctatacaccactagctatgttgccattttatattatttctataaggtgccaacagaagctgctcatcagatcagacagacatagcccaggcaagtattgatttacagatgatctttggccaggaagacatggtatcagggtagagtctggttatgggtcaatgcagtggggaccttaggtcctacaggtataactgagagcctgatccaccaggccttagaaagcttcagggtgagacagtccagcaccctggatagctcctttaacagctgtggccggtaagcaggcacttatttgctaaagaactcaagcccatttagctggcttcatctgctttgtagagctctgttaaaaagagttcctatttctccacatcctctccagcacctgttgtttcctgactttttaatgattgccattctaactggtgtgagatgatatctcatagtggttttgatttgcatttctctgatggccagtgatgatgagcatttcttcatgtgttttttggctgcataaatgtcttcttttgagaagtgtctgttcatgtccttcgcccactttttgatggggttgtttgtttttttcttgtaaatttgtttgagttcattgtagattctggatattagccctttgtcagatgagtaggttgcgaaaattttctcccatgttgtaggttgcctgttcactctgatggtagtttcttttgctgtgcagaagctctttagtttaattagatcccatttgtcaattttggcttttgttgccattgcttttggtgttttggacatgaagtccttgcccacgcctatgtcctgaatggtaattcctaggttttcttctagggtttttatggttttagttggtgggactgtaaactagttcaaccattgtggaagtcagtgtggcgattcctcagggatctagaactagaaataccatttgacccagctatcccattactgggtatatacccaaaggactataaatcatgctgctataaagacacatgcacatgtatgtttattgcggcactattcacaatagcaaagacttggaaccaacccaaatgtccaacaatgatagactggattaagaaaatgtggcacatatacaccatggaatactatgcagccataaaaaatgatgagttcatgtcctttgtagggacatggatgaaattggaaaccatcattctcagtaaactatcgcaagaacaaaaaaccaaacaccgcatattctcactcataggtgggaattgaacaatgagatcacttggacacaggaaggggaatatcacactctggggactgtggtggggtcgggggaggggggagggatagcattgggagatatacctaatgctagatgacgagttagtgggtgcagcgcaccagcatggcacatgtatacatatgtaactaacctgcacaatgtgcacatgtacactaaaacttagagtataataaaaaaaaaaaatttaaaaaaaaaaagagatcttagttcttttgggcttggggactcactcttgttcacttaaagtggattggttcttacatttattttcatagttgtgtctggtcaccttctggcttgatgtatgcccctatgtctggaaaaggttagagaatggggtagaagtggaggctgcccgcccatcatgtaactgttttatcttttcagagatacaattgggatcctaactctttggtctccgtatttccacacttgctcttatacgattcagtttccatgcaacagcaggagagatattttagatatattaatcaggtcctatggtcttgagtttacagctctcagtgtaaatcttactctcaagagaaaaattttccttctgcagctgaaaacattcgacatattctctctcctattccttctcccccattcactgtactccaggcacaccagcttttatttttatttattttttgctattccccccaacacgccaacatgttccttcctcaggatctcagcacatgtggttccctttttccctttgcttgaaatacccagatctttacttggctggtttcttgtcattcagattctgcccaaagtcactttctcagaagtagtgttacccttccacgagtaatactactcttacttctctttacagctctcaaattcttatgaagttttcctatttattcatttgtttgattattgtctgtctgcatcaggtaccgtgcaaacttggatgtaaactcagtgatagctgatttctgttcagcattgtttgttgctatagctccagtgcttttagtcatgttgggcacgtccctactaaatagtagaatatggcgaagggtcagagtcatgatagatagccggatgtggtggctcatgcctataatcccagcactttggtaggctgagatgggcagatcacgaggtcaggagttcaagaccagcctgaccaacatggtgaaaccctgtctctactaaaaatacaaaaattagccagttgtgatggcatgtgcctgtaatcccagctactcaggagactgaggcaggataattgcttgaactcgggaggtggaggttgcagtgagctgagatcgcgacactgcactccagcctgggcgacagagtgagacttcatctcaaaaaaaaaaaaataataatgatagataaaaactgctagaggctctctgagaaggaagaaatgtcactgggttaggttggtaagagaagtgttaatgcaagtggtacatttgatataagcatgcaaataaatggtagtttggaggaaaattccagaaatgtgaaacagtattgagaaattgagtaagccagctttgagagaacacacggcttattgtcctctccttctgttttgctcctcagctctctaaagtgggcattctctagggtcctgtcttcaatctcagcttctttttcttcttcatccttctctttccacctagtttcctagggaattatatatatatatatatatatatatataattttgtatatatatacaaaattatatatatatataattttatatatatataattttatatatatataaaaaattatatatatataattttatatatatatacaaaattatatatatatgtctggtacaggctgaattgtgtctcccagaaagatatgttgaagtcctaatgctcagtgcctcagaatgtgaccttatttggaaataatgtcattccaggtgtaattagttaaggtgaagttatactgtggtgtaacccacagtatacttccagtatatacttcagtatatgggcccttaatctaatgtgactgatatctttagaataagaagaaaatttggacacaaacacagagaagagaatgtcatatgataacagagagagagagagagaagagagagagggaggagagagagggaggagagagagggaggagagagagagagagaaggagaaagaaagagaggagacagaagagaaacatctacaaagcaaggaacaccaaagattgctggtgcctaggaaactaatataataacataatatttggggcctaaagtgttacagctgcaccaatatctcccaaatcttgctcctagctcctgccccagcctgattttctcagtgactcccctgtgtttccctctgccaccagcccctccttctgcctgctgtgtgtgacagttcccttgccactccctccggcatccgtacttcaaactggggagttagttatttccattgtttcttattgcagcctctggctctgacgtttccagagctgttgcatagctctattgagtctatctccttaaatgcattttcatccacttaccattgctgagttagctgcattacctttcaccaggatgcttgcaataatttattgtttccatttgccttctccttcatctaagccgtttgcttatgtcttttttcttgttgcgagacattctgcacattgccactctattagtggtcataaagcaaatcactgatcatgtcaatacgcagtacaagatcctttaatgacctccatagcccatggaatggtccttaaacaagagttcaaggactgccacaatcttgttctagcctatctttctagtcattttaaagtcaccatttttacttgtgaaataggcactccagacacagtgaattccttgttcttctacaaatatgatgattccatttctttgctgggaatttctttccagatttacctgtaaaaattcttcgaaccctaatcaaaagtgactgttgttaagcccctgaagataatgcagaaattctctctctcctgggacctcgatattagtttattccattgtattgcatatatttgattgcccatgttctgtcccatactgactgtaaagtccttaaaggtgagggcccaatattctcagagtcactcaataaataaataaaagaataaatggaaattaggatcagtttgtgggctttagcaacacaaaaacattatactttttcaacatgggagaggtatgatgaaggagtttttttttttttttgagacagagtctcactctgtcactgaggctgcagtgcagtggcattgtgtcagctcacaacaacctccgtctcctgggttcaagcaattctcctgcctcagcctcccgagtagctaggattacaggcgtccaccaccatgcctggctagtttttatatttttagtagagacggggtttcaccatgttggccaggctggtcttgaactcctgacctcaggtgatctacccgccttggcctcccaaagtgctgggattacaggcgtgagccgccgcacccggctgatgaaagagtctttaatgcagattaatctggcagaggtatataggagggaccagagaagggaaagaatcaaagcgtgaagaccaatttggctgatattcaactagcttagatgtactaaaaatctgtactttttggtatttgtgaaatggaaagaaggggaatagaataaaggatattataatgaaaggatatacattgcttgaaggtaattaaatatgggttatccaggagataaaagagttaaagaggttcagacatagactgaatgaactgagaaatgaatgacttggtcaccaagaggaaggccagtcatcagggggtaggataagttcaattctagacatgctgcatttgagatgatagctggatgtccagatggaattatccagcagccacagaaacagaatcagctctctgcggatattccaggggtggggatttgaattaatttcctcaattaattttaaagaaacttgatgaaaagaatggtctgaatacttcttgaaggttgcacattattaataatggagaaataactctaaaaccttcctcttgattttcataataatataagcattccctgaatcttaccaaaccttgtaagaaacactcttattataaaaagtgtatgtgcaaagcccttctaaacaggaaaatgataaattagtcctacagggccaaatgcagctctctgggagcttacaattcagaaagaacatcctgctaccagcacattaagctgtacaaatagtaaactgcagaaacaaatataagcatttttatgatgtccaaacaagaaccaagcaggtgtttttttttttttttttgcagattatttatactgtggcagttcatagcctccttttcggacccagagcttgcataatccttcccttatttctacttacgtgttttactctccatcatgtgttaacatacatactgtgcaacagaaatgactatggaggctgagggcagcagagttttagtgtgtacacatatgagctgtcatgtaattttcaagtgaaagcctttgcaatgaaactttttaaaagaaagtcatggccgggtgcggtggctcatgcctataatccagcactttgggaggctgaggcaggcagatcatgaggtcaagagattgagaccatcctggccaacatgatgaaaccccgtctctactaaaaatacaaaaattagctaggcatggtggtgtgcacctgtagtcccagctactcaggaggtggaggcaggagaatggcttgaactcgagaggtggaggttgtagtgagccgagattgcaccactgcactccagcctggcgacagagtgagactcgtctcaaaaaaaaaaaaaaaaaaaaaaaaaaaaagagaaagaaagaaagaaggaaaaagaaagaaagagaaagaaaggcgggcattaacttcaggtattggtaaatttgctaggtgtttggctactgtttctcatcagagaaatagaaagacacaccatgaaagtcaaggcctgaaaacctcattccatgtaagaatgacatccccagtgttaagtgcttgttagtggttaatgcgatcctgtgaaacttagatgtgtttgtgcacacatgcacgcatatatttgaagaactcagaagagttaaatcacagcctttcaacctgtgaaatgacagtagttcttcttttttcctctccctttggctaagtcatctttatcttggagataattaagacaaaaatgcctctgacaaataaaatcagtatagaacccctatttcttggcagcttttgtggacacagctgaagctttcagaggtcttgaaaaaccatggcaacaaatgcctttgaagggtaagcaaaggttccaaatgtttttaatcgctggtgttttttctgctaccacttcaagcatttttcttcattttttgttcatctgatcaaaattaaatttccaatttccctactaagtggttctgtcctggtcatgccattgactatttccattaaagtagtagagtttgtgcccacatatggttgttaagctcatcaacaattccattagaaagctttgtttatcagtggcaataatttcccataaaaattatagataggttttaatgggcacattttcaaaaggcatcaactcgtcctcaaaattatgtgctgacactgttcttacaaccatggttcgtggcctaattccaccaaatttctctctttttcatagagaactgttgtcagtagctttatatccttttaaagagaatggtctgtatctctgatactcattcagagaaatgagtattttagacgtaggttgctaattttaagctatatactacactatgtcagcactatataggttatcttgtaacctgcttgcctggctatttggctgaaaaataacaacatgtaaggaaaatctatttcataagtctaacatttactttgtaaaacttgttctggctactctgttaattttccacttacgtgtgggttagagagcagatttgatttttttttaagcgaaagatatggcttacctgagaaaagaacatagtggggaaagcactcctattattttcctcatatttccattttcctttagcggaaataaaaagacatttcagtttttcagttgctaagaaatgaaggaaccaaagacaaaacaacttaattattaaattacaatttatttctgtaataagcactcgttctctctgttttcctggggaaagagtatgtggactttcaattttatccaaataagcatcatctttctctgattagtgtggcagtttcaaaatcatgtattaggaagtacagagtgaatgagtagagaatttctaaattagcacccaaggttgggtggctagattatgtttataaatatgaacttttgtattaagtgcaatgatttaaaagaatgcctgcatcactttagggcatttcattaagtgctgtgcacaatatttttccttatacatcataaaagataaattatagttcataaaatagtataaattcctaattattttgtgcttttgacacctcagagttactaataagggatttcgttttaaaatgatatttatttatttatttagagacgcagtctttctctgttgcccaggttggagtgcagtggtgcgatcttggctcattgcaacctctgcctcccaggttcaagcgattctcctgcctcagcctccagagtagctgggaccacaggcatgggccaccacacccaactaatttttgtatttttggtggagacggggtttcactgtgttgggcacactagtctctaactcctgacctcaagtggtcctcctgccttggcctcccaaagtgctgggattacaggcgtgagccactgtgcctggctcgttttaaaataatttaaaagtatattttgccaccactattaaccagttaagccatgatggtatattataatcaccatggagatggtttttctctttattttattttgtttgttttctgattgctagcatgctgattactcttcctattctacaagtgcctgcaggccagccccatttttgctctcttcacttcatttttcatttctccctgtttcactcttcatagcacatttgtactctgtccacacctagagacctccctgttgaagttcttcacattctcttccctagagagggttaacttgttgagctcagagacttaaacttaaaataaaatgtaacagatatgtattgaatgactattttattttagctctaggagaaatgcaaagatatatcatccatagaccctgaaatccagctaagggttctgcttatacacaaggtgaaaggttgtgataatgcacattaaacaatagaagagttaaattcagcactataagtgatgcctcaaagcagcataatgggaaaaaggggtatttcagaaaaaaatggtatgagttcagaggcaagagaaaacagaatgctctagattaaactcaaagactttatggaggaggtggtgtttcaatagatacctttccacagaaccatgaagagagttctacttaattgtaagtggcctgtgatttgtcgttagtcattgcatgctcaattctgcatgtgtgataactgtgtatttttatggcaaaatcgcaattacttttgcaccaacctaatagaatagtgtgggtttaaaaaaactatttgtaatatattcgaacatatttcttatatatatgtttcaccatcattagcagtaaatctattttgcatccagagattgaataatattttgtttctaggatgtgagtgatgtactattttaacttacttttgaagtttgacatgggagtgatattaataaaatctaaagatgctcctaaagaggagcaatagataatgtaggtatagataatgtagctattatggaggtaagtgtatttgatactttttattatgatatgaagggaaacaactagtcccaagctacaatttattaaggtaggcttagcttatacgccataatttttatgtttgcaactttcttgattttcttcctctggctttacttctatgggatatttatgaaaggatgtttttaaaaatggctagagacttttgcttctaagagttgacataaacttttccacaacatgaacaattagtagatgatacacttagatacactcttgaatttttaaaattgtggcagtaaaactgatctcagagaaggaagaaaatgctttggccagcttttatcaattatatacaacgtgtttggaagattcagttcctctcgccttctttctccctatataatactttttcttaaggttggtactattgatgcacttggtgtaaacacatgagataatagcaaaatatgaatctaggtcccagaaatgggcttctttcactctgccacctgttctgactgcatttctcctgactttctgtaaatcccggggaggagctggaagagcaaggtgtgtgctagcataactttggggatgaagtacccttctttttttctgattttgttcccacatctccttactggaccaagtaagggcatcagtgtcaaacttcctgattgaagatacatttttgccctaccatgaagggctctgggtaacatttattgcttataaaatgcttttttggtggctactttgtttctgaatataaggcaagataaaaagtttgattcaagagtttcttgtaaacactttgtgtgtgcgtgtgtattcatatatggctgcacacgtacataagtccatacataagtacagtccaccctccatgtttgtgggttcaacatccatggattcaaccgactgcaaatcaaaactatttggaaaaaaatggatggtagtgtctgtgctgaacacatacagagattttccttgtcattattccctaagcaatataacaactgtttacagagaatgtacattgtattaggtattataaataatctagagatgttttaagctatatgggatgatgtgcgtaggttatatgcaaatattatgtcattttatataagggacttaaacatctatagattttggtgtctgaggagtcttcgaacaaatcccccacagatcctgaggggccactgtatatatatatcttcataaacacacccacacacacaaacacacccacccacccacacacacacacacaccaatgtgtatatacttttttttcttttttttaattcgagaccaagtctcgctctgtcgcccaagctggagtgcagtggcgcaaacttgcctcattgcaacctctgcctcccgggttcaagtgattctcctgcttcagcctccctagtagctgggattacaggcgcctgccaccatgcctggctaatttttgtagttttagtagaggcagggtttcaccatgttggccatgctagtctcgaactcctgacctcaagtgatttgcctgcctcggtctcccaaagtgctgggattacagatgtgagctaccacacccagttgcaatgggtatagacttttgaaatgtgtactacaaaatattaacagtgactatctctgaatgataggattatggataaattttgttctttttgcatatctgtatttttatttttccacagtaaacatcttttacttctgtaataaaaacttcattaaaaaatccatgctgcaattgattaattatatactaacttttttttactcttccctcagtacagaaagattattctgtatttaccaaatctttacactttatttgcaaatcattttgactgtctgtttgcaagaggtcaaatttgcactcaagttcagctttcgttcattatccatgagcccaagagaaattgtgtcaggtggacatcaggtagctgaggccaatacaatattattcctttgggttgttgagaaatcatagcagaggaaagcctgtgttgataatagagtaccaccaggaatctaggtctttacagctgctggcctgaccagcaagggtaaaatatttcagtcacgcagccagtgattattaaccctagctctatattccagagaggaagagctagcctttttgggttgtgatctgtcactgattgcagttgcacatatactagccatgaggtctacacacatgtgaagagcatgctacacacatagactagatacactgactcatcagcctggaaacagtgcctgaccctcactttgattgtttgaatgtgtcctgacccattaccctgcctttggatccgttcctgtttttttttttttttttaaagcattttatctgtgaattaaaatagtactttccattgcttcatttttttttccctgaggagtttagctttgtttaattagaaacaagacaacaatcattactggtctggtgcaatcttgtttaggactcctcttttgcttagaactatacctggattagggatcactgtgatttagagtgtgcagtatgaggttatttaaatacttaatagtatatttgaaatgaaaagagtagaaattaaagactgaatcatttaccaagaaataacagaggagaccaatttacttctgtaagatttagtagaggctgttcccttctttataattggctttgtttcagttaccagttaagtggggtgaactgttattaaaaggctatgggtaaggttacagtagcattcttctaagaaaaactacaggagtagtcactgtgcagctatctgctttgtacctgccaatatggcagtagatatggaagggtcagaaaaacaggacttcatgttcaataacttttcctttttcctttctttcccttatttttttcatgtcttgtatgcaagatagcatgcctattctttaccttcaatgtatttttgaatttttaatccagatcatattttatcacaatttgtaacatgtagctaataaaaatggttattacatgagaacttgctttacaaattatagatcaaatttttatacaaattattatgtcaccatagaaaaatagttacgatttatctgtttagtcttagaaaaattatttcacatattagttaaggcttttagttttgagtgagcaaaatccaattcaaactagctttgggtagaggtgggggtaaaagagaggaatggatttcaatggaaggtttacttgcgtgtcttggctaactgcaaacatggcagggtgcaaccagaccttagtgatcacagacccagggactcagaccctgtgaggaccttagccttaccgccactcttctccatgtgtcagcttcgcgttctctgtctgcaagtatgcattttccctaaggtgggaagcagagttggcaacagctgccagggttgacttcctgtggcattcttgcagttagcaaatattagagaaggactctgcttggcccagctttgggacacacctctggaccaactagctgttctcaggaggcagtaacatgtacagaggtgatccctggggctcgccctgtgaaatcattgtgagccaatcactacctccctccctgatgctgatgtctactatgtttgatgtctctgaacttccatttcctcaattgtgaatggcaccctggttcctaccttgctggatagatgtagtgattagagttcatgcttaacctacaggtgctctgtaaagaatcattggcatcattacctcttgttggctctatcccattccctatagatatctttctgctctgagactaagcagagaaaataatttaacatttaattattgtgcttctaaatccacttttacctcttctttctttacttttctctttattatttttaattatttcaaaaataaaattgtatatatttaaggtgtacaagatgttttgatatacatatacataatgaaatgattactgcagtcaagctaattaacatcaatctcctcacctagttatcatttttggggggcatggagtgagagcacctgaaatctctcttagcaaatttccagtgtataatacagtattgttaaacatagtcatcatgttgtacattagatttctagacttgttcatgctacataactgcaactttgtaccctttgaccaatacctctctattttctccactattccatgcctgaaattgtgggatataggtatatagtgtgtgtgatatatatagagggagtgatatatgtatatataattgtgtgatatatatgtgtgtatatacaaacacacagacatacacacatgtacatatgtatatacatgcacacatacacaatgggatattattcagctttcaaaaaggacatcctgccatttgcaacaacatggatgaacctggatgacattatgttaagtgaaacaagctggacacaaaaagaaacatgcaccttacttcttagacacaaatttctttctcatagccagcacctgaaaatagggccaagtattttgcatgatttacaattgactgtataaatgtagcatagccagttatatgatgtgttaccatttctgctataaaatcaaaagaagagatcagaacatttaaaaacttccctgtggatttctacctcttacctaagctttgttcttgtttttttaaacctcatgaacacgaagctttagatagcggaggtcatgtatccttgggctcaaatatacagtttcttagcaatctttgattgctacattgcccttttttgtgtttttaactggccttccctgacttaaaatatactttaaaaaataacaaaggtggtatttagtttgcacagtatggaattaaaggtaaacaactttaaattaaatttggttggatgtataaattattaaaatatcctttctctcatggctgggtaagtctgcattttccattcagcctgctatgtctctttccatgagaacactcccgaagaatggggccctgcttccaaacaagccaagcattttgtagtaaattttaaaaagctaaatttcataataacctttataattgctacctgaaaatggagtttggaatggcaccaaattattaatcagtagaaggagaatagattgcaaaaaggtaattatatcaaattgaatgcttcttgaaatatattctgttaaataaaatacagttcctcttccctgttctcatttgtaagcaatgaggacaattcaggtagcatgaatcaggaatcagagtacttttctgttccgcagattggcttaatcattttgggctcacttcaaactgtagatgagcattgtcctttaacctgccgggcagcagaggtgaccacgttcactgcaaagcccagaagtgagttgttcatctgggttagggtctcaggaagaggcatgttatgacttccccacattcctggacagtttagactgtaattcttggttgtttaaaaaggtgtttgaatgtattttgttcagaggcttgagtaaatggctcttattcttacacttttttttttgcctgctttttccagcattagaatagtttcagccctgacaattagccttatgctgactggagtggattttttgcgtaggaccaagtgttttgcatgatttacaatggactgcataaatgtagcctaacaagttatatgatgtgaagaaaattacttaagggtaaaaatggattgtttactgagaaaatgatgttattataaactggtttgagggtattgtggtttagatgctgtccttacaaatttgagctctgttggtttggagatttaatatctaataataatagttaatgtgtaatgaatacttgccctgctccaggctctatgttacgtgtcctgaatgcatcatctcatttaatcctccataaaatttgaagcagtcagcattgtaattaatctcacttttcagatgaggaaaccaaggtatgtaagaaacaaaaccagtgttgaatctgactagtacgactgcaaagcctgactcttaaccattgtgttctgttgccttctccaagggaaaggagtgcttccagaaaggccattggaagtgaggagtgtcacctgataatagctggctcctcatcccactaggttaacaggcaacagatgggggccacagagttggctggagttagtcctggttgccaagggtaaatggggctgttaccatgcaatggatagaaactaggatgctcctgtgtgtctccttatatcctaccaggtgtagcatgaaggttaaggacaattccgtcctcttatttggagaggagaccaaggccctgtaggactaaaggtttgggtgagctgaaagccaagggcaattggcccagcttggggaggagagttacaaatacatttgtgactatcagaccagaaacagactgcggtgttcacctgcggtttgggtacctgctgcttgttctttgctggggtatctgaagactgaaaacacagctcacacttagcctttttcctattctgtgtgaaagaactgtagtagttttctcttgcttaacaaggttctagtggtgaagtttattgcttagtctgtgagttgtagggaaataaccacaggatgggatggtagcagaacgagaaaagaaaagaagattgtagatgccaggctggtgtcggcttgaaatttttaaagtatacagttcttctttatggattattaaaaaaaaacagcaaatgaatacacaagattaaatgttaagcagtacaacattgtacatgatgaaaggttaaagtctttctctggtctcattcaaaaatctacagtctcttgtagtatagtttgaagtcaggtagcgtggtgcctccagctttgttcttttggcttaggattgacttggcaatgcgggctcttttttggttccatatgaactttaaaattctgtgatgaaagtcattggtagcttgatggggatggcattgaatctataaattaccttgggcagtatggccattttcacgatattgattcttcctatccatgagcgtggaatgttcttccatttgtctgtgtcctcttttatttcattgagcagtggttttgtggttctccttgaagaggtccttcacatcccttgtaaggtggattcctaggtattttattctcattgaagcaattgtgaatgggacttcactcatgatttggctctctgtttgtctgttattggtgtatagaatgcttatgatttttgcacattgattttgtatcctgagactttgctgaagttgcttatcagcttaaggagattttgggctgagacgatggagttttctagatatacaatcatgtcatctgcaaacagggacaatttgacttcctcttttgctaattgaatactctttatttctttctcctgcctaattgccctgtccagaacttccaacactatgttgaataggatggtactggtaccaaaacagagatatagaccaatggaacagaacagagccctcagaaataataccacacatctacaaccatctgatctttgacaaacgtgacaaaaacaagaaatggggaaaggattccctatttaataaatagtgctgggaaaactggctagccatatgtagaaagctgaaactggatcacttccttacaccttatacaaaaattaattcaagatggattaaagacttaaatgttagaactaaaaccataaaaaccctagaagaaaacctaggcaataccattcaggacataggcatgggcaaggacttcatgtctaaaacaccaaaagcaatggcaacaaaagccaaaattgacaaatgggatctaattaaactaaagagcttctgttctttgctggggtatctgaagactgaaaacacagcaaaagaaactaccatcagactgaacaggcaacctacagaatgggagaaaatttttgcaatctactcatctgacaaagggctaatatccagaatctacaaagaactcaaacaaatttacaagaaaaaaggaaccccatcaacaagtgggtgaaggatatgaacagacacttctcaaaagaagacatttatgcagccaacagacacatgaaaaaatgctcatcatcattggccatcagagaaatgcaaatcaaaaccacaatgagataccatctcacaccagttagaatggtgatcattagaaagtcaggaaacgacaggtgctggagaggatgtggagaaataggaacacttttacactgttggtgggactgtaaactggttcaaccattgtggaagacagtgtggcgattcctcagggatctacaactagaaataccatttgacccagccatcccattactgggtatatacccaaaggattataaatcatgctgctataaagacacatgcacacgtatgtttattgcggcactattcacaatagcaaagacttggaaccaacctaaatatccaacaacaataggctagattaagaaaatgtggcacatatacaccatggaatactatgcagccataaaaaaggatgagttcatatactttgtagggacatggatgaagctggaaaccatcattctcagcaaactattgcaaggacaaaaaaccaaacactgcatgttctcactcataggtgggaattgaacaataagaacacttggacacagggtggggaacattacacactggggcctgttgtggggtggggggaggggggagggatagcattaggagatataactaatgtaaatgatgagttaatgggtgcagcacaccaacatggcacatgtatacatatgtaacaaacctgcacattgtgcacatgtaccctagaacttaaagtataataaaaaatatttaaaaaatctacagtccctttctcaataggtaaacactattaacaatttcttctgaaaattacatatgtacacacacacacaccccacacatagatattttgttaacatacattaccttatgctctacacattattctgtgcctagcttttctcatcgaataatgtgtattggagatctttccatataagtacatattggtctcactcattcatttttaatggctgtatattagtccatagtatggagtaataataccttttattggcacaaagttttgcagttgacaaagggtttgcatatattgtttcattgggttgtatagcagtcatcaacggacatatcaagaatcccagaagggtaacctgggcttcacccaggatcgcatggagcttgggactcaaacagctaacattccctaaacaggcccatattcctgcaatttagtgcagctgctacaacatttaggtaaactctttgaaagcagtaaaaagatcaccaatctgggacatcaagaagccagacgacaaggagacatagacctcaggtgagtgagaaaagagaataattgaagtttagaactgaatgggcactaacgaacaacagatacatctctttcctttcaccgatgaggacctgggtgtggcctgtggatgttaagtagcatgtttaggccacacagctggattgttttctttcctgaggctagctctggagaggggaggaaacggagatgctagatttttccgggctctcttttctcatcagctagaatgggatgtggatggaatgcagcttgagaagccaaacacccttgagaaatgagaactctgctttctgatgtggggcgcatcctatctgagataactctcctgccagcgcagtatgaccattgcgacttgagctgtgtgggtgcccaggtggtgtagaccttaaaaccactcctgcttttgtttactgaatgtctaatattcacacagttctttgtctgagtgcagggccaaagcagcaaataacgaagaagctgtgcccaaccataagaactatgaaatgctccagatcatctacgctagtttgagttaaatttaccatgcaaataaatatagaacatttcttcttatgcatagattgtatttgttctattaaacaaccatcctgtaaaggttttattcattcatttatttttatttgttaggagaaattgttatttaagctaagaaagtagactagtagttatttctttttttttgcttattatactttacgtttggggatacatgtgcaggttagttacgtaggtatacacgtgccatggtggtttgctgcacccatcaacctgtcatctaaattaggtatttcttctaatgctatcccttccctagccccccaccccctgacaggccccagtgtgtgatgttcccctccctgtgtccatgtattctcattgttcagctcccacttatgagcgagaacatgcagtgtttggttttctgttcctgtgttagtttgctgagaatgatggtttccagcttcatccatgtccctataaaggacatgattgcatccttttttatggctgcatagtattccatggtgtatatgtgccacattttctttatccagtctatcattgatgggcatttgggttggtttcaagtctttgctattgtgaatagtgctgcagtaaacatacgtgtgcgtgtgtttttagaatagaatgatttataatcctttgggtatatacccagtaatgggatggctgggtcaaatactagaaggctacagtaaccaaaacagcatggtactggtaccaaaacagatatctagaccactggaacagatcagaggcctcagaaataatgctacacatgtacaaccctctgatctttgataaacctgacaaaacaagcaatggggaaaggattccctatttaataaatggtgttgggaaaactgactagccatatgcagaaaactgaaactggaccccttccttacaccttataagaaaattaactcaagatggattaaagacttaaatgtaagacctaaaaccataaaaaccctagaagaaaacctaggcaatacaattcaggacataggcatgggcaaagagttcatgactaaaataccaaaagcaatggcaacaaaagctataattgacaaatgggatctaattaaactaaagaacaactgcacagcaaaagaaactatcatcagagtgaacaggcaacctacagaatgggagaaaatttttgcaatctatccatctaacaaagggctaatatccagaatgtagaaggaacttcaacaaatttacacacacacacacacacacacacacacaaacaaccccatcaaaaagtgggtgaaggatatgaacagacagttctcaaaagaagacatttacactgccaacaacataaatatgctgccaacaagcatatgaaaaaaagctcatcatcactggtcaagagaaatgcaaatcaaaaccacaatgacatactatctcacaccagttagaatggcaatcattaagaagtcaggaaacaacagatgctagagaggatgtggggaaataggaacgtttttacactgttggtgggagtgtaaattagttcaaccattgtggaagacagtgtggcgattcctcaaggacctacaattagtagttatttctaggtctgacgggctgtcttttagtttgttttcttattctgaggtggacttaaaccaattttaaaaacagggatgactgaattcgtgtgttaatcttgtactacaggaaccctttgacattgattcagaagcacccaagtgtttgttcattaatccttttttatttttgcatattatttatttttcaacttttattttaaaaatcaggggtacatatgcaggtttgttacaaaggtatattgagtgatgctgaggtctggcatatggatgaatctgtcactcaggtaatgagcatagtacccaatgatagttttttgtacccaatgatagttttttgttttctttgtttttttttgtttgtttgttttttgagatggagtctcgctctgtcacccaggctagagtgcaatggcttgatctcggctcaatgcaacctccgcctcccagattccagcaattctcctgcctcagcctcccaagtagctgggactacaggcgtacaccaccatgcccggctaatttttgtatttttagtagagatggggttttaccatattggccaggctggttttgaactcctgacctcaggtgatctgcccacctcggcctcccaaagtggtgggattacaggcgtcagccactgtgcctggccccaatagatagtttttcagtccttgcccctgttcctccttcccacttctagttatcaccagtgtctattgtttctgtctttatgttcatgtgtaccaaatatttagctcccacttataagtgagaacacatggtatttggttttctgtttctatgttagtttgcttagatagacctccagctgcatccacgttgctgcaaatgacacgatttcattcttttttatggctgtgtagtattccgtggtgtagatataccatatattctttatctaggataactgatgggcaattgggttgattccatgtctttgctattttgagtagtgttctgatgaccatatgggtgcatgtgtcttttcaatagaacaatttattttcattactcttatcaggatacctgggaggaacttctcctacgaagttaatttggggggactcctgaagatgagtgaaaccccttattaagcacttagagggtcgaaagtgtacaagggaacgttcaggtgtgacagcttgagagacatgcatattccacccccacaccagagcttagtgaaccgtcttttctattttctcccaaagcaccaaaatggcccagaaattggaagatggaaaatggacttatttatgagtctgggaaggcagggcagtaagcacagtcctgttcagggttctgagttttaccctcttgctctgattgcgagatcattttcctcttccttgcttcttcagcttaggacaagaacagtttggaaattgtttctactactttggacaccatagtttagatttcaaatgagtacaagtgggaggaaagcttggataattctctggaaataatcgaacagagtgaaggagaggggtctacaggtgagctgaatgctgcatggcattgaagtaatcacaccagtcgtcacaattctctcctctttgatggttatctgttgtcccagaaggaacaatttcagaaagtccttttctggactgtagaatagcacttgcttatttgatgagccctgagaagcattactgaaagcggttcattgtccctgaggtattacaatgagatggtggtcactgatttcattatgttttcctttattgcagctgttggtttgatcctttgccaggtgcttaaaacaattgtggttttgcagatggtaagttagaggttggacaaaaaaagggatcatgtcactgccctggccaaaatttcaacagactggggtctagtgagggcaaatagatagaggctttcctcttcactttgtgttatttagaaaaagaaactttccaggacaaatttctttcctagaattccttttttaaaaattttttttctttgaaaatttacttagatgcaaataatatatttttcttccttttaaataataaaagtaagatgtctcttggaggtggtggttgtcactgacaagattaactagaactgactagctgtaaaaatataatttgggatgcattattaaggcatgccatttttatttgcatgccattgtgtacagatgtggttgtgaaatagttcaaatcatggcacattgaatgtcctcactggatttttaggaatgtgttcactgagacagccaaatcctatttcattttctttggctcattgcattggctgtaaattggagatattcactttaatatgtgagtcaaaatttatttccaaacataatactgcagttgttctgtcacagaatataaatttcttatttatttccttaatacgttgctttctactttttctttttttctttattttattctggagtatgtggaaaggttttccagaaagatttgcatatgccataatctactgatgaatactttttttgggttactctttcatattttgggagatataactatggaagtgttaggaatcatgggttctggaaatagttttattactgcttctgaaatgccctcccaatgataccatatagtaattccatcagggaataatatttttattatagtttaaaatataacttaatatttaggtgctcttgttcagtcatcgtcaagttctttttatttcaccaaccctaccatggcactcctgaaagacttgtgaatgcgacagacctggatttaatcatggctttgccatctgctagccaagagaacttgaacaagtgagtcaacttcttggagtctcattttctgcttctgtaacatgggaactagggtaatctaactcattgcttgtgatgattagatgaggcaaaatgctgagttcacctagcccagcacctggtccatgggaagcatgtgggttctgctgctacccagtccttggcccagtgcatggtgcacagaagggaatctgaacaggccaactttattcctattcttgacccaccccatgtagatgcttcctacatcttcagcttcttcttcttcttctttttttttttaaggcagggtctcactctgtcccccaggctgaagtgcagtggcacaaccacagctcagggcaacctcgacctcctaggatcaagtgatcctcccacctcagcctcctgagtaactgggatgacaggaccacactaccacacttggctaatttaaaaacttttgtagagctggggtcttgctatgttgcccaggctggtctcaaactcctggattcaagtgatgccctcacctcagcctcccaaagtgcctggaaaacaggcctccacacccagccttcaacttcattttaaaaaattgtggtaaactatacaattcatccatgaaagcagaaaccacttgtaccccaaaagctattgaaatttaaaaatatatatattaaaaataaaaataaaattgtgataagatatacataatatgaaatttactactttaatcatttttaagtgtacggttcagtggcattgagtacattcacatttttgtgcaaccggaacttttcatcctcccaaagtgaagctctgtacttattttttattttattttattttttgagatggagtttcactctagtcgcccaggctggagtgcagtggtgcaatctcggctcactgcaacctctgcttcctgggttcaagagattctcctgcctcagcctcccaagtagctgggattacaggtgcccaccaccacacccagctaagtttttgtatttttagtagagacggggttttgctatgttgggcaggctggtctctaactcctgatctcaggtgatctgcccgcctcagcctcccaaaatgctgggattacaggcatgagccactgtgcccggccagctctgtgctcattaaacaatgactccaagttccccttccccacatctcctgctgacctctcttctactttctgtctctgtgagtttaactattctaggtacgtcatgtaagtgcatctatgtgatatttgtccttttgtgtctggcttatttcacttagcataatgtcttcatgattcattcatgttgtagcatgtgtcagagtttccttcctttttaaggctgaataatactccactgtatggatagaccacactttatttatccatttgtctgttgatggacatttggatgatttccatcttgtgggtatactgagtaattttgctatgaacatgggtataaaaatatctatttgagtttctgctttcaattattttgggtctacacctcaaagcggaattgttggaagtggaattgctttccacttgttggaagtggaacatggtctcccacttcattttgacacaacttccaagcttcagaactgtatttacaacagcgtgctgggaggtcgctttgagtttatgacggaaatctcatatcaacaggttttaaattgttccatacgacttcttgccacccctgtcccaattcagatcttttttttgattaatggtatgaacaattttcaaaatatcctggcacaatctattagaatatttgactttctcctcctcctccctttagccctaactatttggcaaagctgttgaaaacttcttcacatcttctctctgcctcatctactttgctactcaaagatgattagtagatgttttggtatgattttttttccttggcataactgtgaatacttttaatccttcatgttttatgacaatcatacattcccacttttgtgtaaaaacattttgaattcttctttctataacaaattctttgccagtcttccttttctttttgcttttagtgagttccaatgatatcattgtttgaacctgttttctaattctatgctgctattcccatactccctctttgctttggttacagtagataatgtgggtggtcctaccaagacaaagcatcactcaggagtcaagggctggggtagatacagacactaggtactgcagaaagtcaatatctttctcagagtgtaaggcaggacaagacttctgttcccttgtaccgttgtggctggggagttggactgtgcatttcatccttgtcatataagtcaaagtattgcccaaataacttaattttggtgtggtcttagtaagtatttgtctcgtagatatgttaaatagaagacagtaacattgggttggctgtgttaattcctcactttttctttcctatacatgagcttcctaagaagcggaacacttggtggtcagacagttgcagagattccttgcatgattgcaatctggaaagtagataccattcttgaatgaagagcttgccctttggagaagctgggctttccatatatggaggttgttagaatgcataagagttcagcttctggaatgaaaggagaccttggttcaaaacccatctgccacttgcttgctgtgtggcttaaatcaggcttttaaacttcaattataattttgcatctgtataataggattaatataattccttcctcataaagttcctagggggttaaatgaaacaatcaatgtataacacacttcctggcatgtgatgttcagtacctagaagactcggtttccttggtagagagaatatttggctagacaagcttatggaattacccccagataggaagtgagcacaagtgtgaaatgaacaagccagagcaggaacggctcttggaagcgtctactcaggcctgggcagttgctggtttatataacagtgctttgaaaattcacgtgcagattcttactattttcccaaatgttacagctcaaaactatgttgtctgtaccttaacacctaaaggataatatagtctttcactgataaaactaaaatgtcataggttttcctttggccaaatatgtatagaaacttgtgatttcacatcagatttaaagctgtatttaacactctatgaaaacatactgatgcttagaagtagaaaggaagtcagattttgacatcttacttgtcaacttaaattatttatagttcctggatgcttcaaaatgtgataaaccatagttaattttatgtaaatattcgatgagtgcctttaataaggagactgtaaaggtagccaagctttatatatgttagctacatttatgggtcaatcgggtataaaaaataggacttcgaaaataaaatattattttgtcggactcctccaatgaggctttttcgcaggattagctaaaattggctcttatttgatgtgtgagtgcttaaacattggagaattcatttttcttttagaattcatttttatttctgagccttaaaatatgaacagttagctaaatgtttgtatatgttgataaggaatgctaagtgtttattccttaatgggacgacaccttttcccggtttacataacttgccttttaatctaaccttatgaaagtctccttgactttaattttttttcagagtactgtatatctctttagggaatgcatttatttaaaaaattataaagcaagaatagatgtgatatattttgaagttttctagtcacaaattaaatccctagatgtgttgtagtttgtggagcactttgaaatgtgccaattcaagatggaaatagcaggaaagaaccattcaagtacgatttctgactccataaagttaggaagttatgataaaggaaaaataactacaccacatacttatggcacagaattgcattattgggacaaattgatcttcaaatttgtaggctatgatggaagcaaatatttgtagtatcttaatattcaactgttaagccaggagacgagtactctgaacttcagcttctcataaaatcagtcagttacatgacagtttatgtagtttatatgtaagaaaccctttgatcaagatatgccttttcttcagccttgttaatacttcatttataaggatttttatttctaggaaaataataccatagacctattttatttaaagctaaagtgtttcctggtgatggtggtgaatggggagatgattcaaggaaactgctaatcttgtagagtttagtaaaatcttggaatagaaattttaaaaagttaaaacacactatgaaaacaaatcattattagtaaaatgaaccatattaaaatgtctccataaccaacgtattatagcaggggaaaatggcattttaattcagaaaaacatttctatataaaacaagctttggaataatttgaatatgttgatttttctttggggcaatcatgaaatacagtcatattaggaaagaggcaaggcctcaaaacggaaagagtagtgaggataattcatgagcaatgcgtggcttcatggatcccttcctggccctcttcatctatgaacatctgctttatgttcatgtctggcctcacccagtgctgaagagcagactgcccctgcttagaaccaagccttgttcttgtggatttgagttttggggtcctgaggtagaatggccatcatattgttcagggtcctcaccttcccactcattacttcctttatagaaccccagtcatccccctcaggaggcctgcgctccacaaatgaagttgggggtgaggggagctttagcatctcagtattgttcagatattggatacttgttgagctccactatgtgtgtgagaatgcgctgggctcaggatcaatagccataaatgagacagatatggcccatcccttgccatgcctaaactgatctgggcattgagacaagcagttaaaacccaacatagtaagtcctatgatgagacacaaactaagcatggctggaagggcagataagatttcacagaggaactgacatcttgactggcacacttagaagatgagtaggagtcagttgggccaagaggagaaaaagtgtgtttccatgaagaagaagagcatgtgccaagtcctgggggtgagaagcatggcatgtgtcaacagaaagacatgatcagagcttggatgggagttagagcggggagagaaggcaaggaaaaacataagagctttgcaaactgtgaaggcattgcatttagatgtcatttttagagcttggaggagcctcaggacattgaggcaggatagtggcctgatggcgtatgattttaggaaaaatcactgtggccaccctgtggggaaggattggcgggggaaggctggaggcaaagggtcctgcggtgggctgtggtaatgatctgggctggagaaggtatggtggtgcccagcgcaaaattggtttcgctttgaaaaataattagaaaatatttgttttgatctgtgtgcctgtggtgggaggtggggagggagggtcaagtgaggaaggagattgaatctagaataatgcccatgtttcaggcttcacgtgcagacatttcttggttcagctgggaagtgaataggaacagactggcgaggaaagaagacagtcgtcagttctgtctggggcacatccatcttgacgagtgtgagagagtcaagtcttgatggacaggggcaggtggacattcaggaaactcaggaaagagatttgatctgaagtgaccaccagaaaatactgacggaaaagaggtgacaaaaggagagacctgcaatattatattggctttctctcaggcaactgcttggcctgtctttatattccttttgaatctctgcatatgtacgggccattatttattttcacaactaacaaatgcagactttctgtgtaatgacaacaaagccaaaccagctgctaccaaaggagggaaaatcagaagagaaggaaaaagaacaagggaagcttggggaaaagctgaatgtgggtccttctgttgctgcaggggctggggtgggcccggtgattcctactgagaggcgttttctctccccgcttcctgtctttctggttccatctcattcacctcctgtcccctccacttcctgccagtcaaaccttagattcctccagaggctttttatttttatcttttgatgggcaagaaaatagtgcggattatttttccaaaccttcacctgaacatcacatcgtggctttggccctatgggcttggttcatccgggcctgcacagaaggacttttcgggccagtctggtcacatacatcgagtcctgtcttttcagttaaaaaaaaacacacacacacacactgctatgtttcactaagacaactggtgtgagttgttttttagaaaatcaactctacttcagtaagattttctcaagcattatcttgagaagaccagataataaaatttaaaaagaatttcttcttttttttttattatactttaagttttagggtacatgtgcacattgtgcaggttagttacatatgtatacatgtgccatgctggtgagctgcacccactaactcgtcatctagcattaggtatatctcccgatgctatcttaatgcaacttaaatcaattgctttaataacacatattgaccaagttacactcattaaggaaaaaaaactactttgttgtttttcttcttctgacgtgagctgaagacttagaaatagttgttaatagtgtttggttaataagaatttgttttaattgcatatatcaaatatgtatttattaaacttttctttttgtcagtttatcaattctagctttgtcacaaaaggtttgccgtatgaacatgattctgttgtacatctatttccatttttgttaagagacgaattcaattgtaaaaatctagtaccttttattcattaaacatgttagttcaggaatttcacttggttctacaaagatacatatctacagtggatggccagtgcaaacatgagactcagccaactggtctctgacccaattcagttctcctgtcttcttctggcttacaaagtaactggctctggggagaaagtgagtcaaagtaatatttggtttgaatggttattgactattttcttctgaaacttaatgtatactaattaattttttattttattcttttttttttagagatagggtctcgctctgttgtccatgctggagtgcagtggtgctatcacagctcactgcagccttgacctcctgggctcaagcgattctcctgtctcagcctcccgagtagctaggattacaggcatgtgccatcatgccaggctaatatttaattttttttttttgtagagacaagatattgttatgttgcccaggctggtctaaaactcctggtctcaaactatcctcccacctcagcttcctgaagtactggaattataggcatgagctgccacacctggccatatactcattttttgttaaaagctgaaatatatcagcatatactgcataaataccacaggagactaaacactgaaagtttctttagggtatcagaagaatacactttttgcttgcagttagcatctgcacagataagttttgtttctggttctattacttcttcagtttgaccctattaataaggacaattctaaaaataataactgtgtctggatatctgaatccgtgtgtggtcttttactgaagttacaggtttataactctgctgactagtttgctggtttctgttatgcaatagaagagtgcaaatgttaatttgatctgaagcccgtgtatacagtgacttttataatgtatatttaaagatggaaagccaagttttatgaggccagcatttcttgtcaagtcctcactccaccctcttctaattgggcctgacccttaagttgaataaagaacaaagagctctgtagttaaaacatttcactgcatgttgcatcttgcccttagtaaatggaaaaaaatagagacttaagcagagaatctgaactagggtgtgaaatatatattcagttttggggtgggagaatgagaaccatgttttacaatagtatacataacttccttagtctaaattcaggacatttccccaagatatgtaagaatttagacttatgcagacagactttataaaaacatgccaatatttattagtttgtgaattttaatattctgctccctataaaccagatttattttgagggataaagggatggaggtgacttctaaatcttagagcagaaacttcctgtgggcagctggacatatgtaccaggagctcagagaagagggttgtgttgggagcgtacattctgagtgatctgcatttggtgatgatggaagccatggacatgcactagattgtcttgtgggagaatatggagtagtaagagaagaagaagacctaggattgagccctgagcacctctggcttaatgttggatggaggaaattgaatctgtaaacaataccgggaggctgcagcctgagaggcagaaggaactggggtgtttgggattatggaagccaagggaaaaagcctgtctcacagcgggaagggaggtatcaacattgtaagctgcttcagataggttatgtaggatgtggactgaaaaatacctgtaaaatttggcaacgcgattcattggtaatcctagggaagttgcttttttggggtaactaaggtggaaaacagattggtgtgggttgagcaatgcaagagaggtgaagaaaaggagatttcatgtgcagacgtttctgagttcagctgggaacaagggataagatagaagatggaagttagagagcatgtggggcaagggagactcttttatgggacagtctcgcatgtgatcaaagccaatgagtaaggagcatttgagggagagagagtcaatcaacaagagagaaaagaaagagggttcatcataaaataacggtaacaacaacgaacatcttttgagtgttttctatatccggggaactatggtaaactcctaacctgcattctcacattcaattcttagaatcgttggatgtggtgggttccatgatttcctctagattagcgaggaggaaagagagatctagaaatgtcaggtagcttgctcagagttctccaggtagtcagtcatggactaatttgtgaactgaaggactgaacttcgtcaccacccagcccaccaagccggcttgactttaggtattctgtgctgcatgtgagtaccgacttaaattatattttaagaagggctactttgaaactctctctctgaaaactctatttctaaaagctctaccctcacaacaattttggcaagcagtcttggtaaaaccaaaccaaaccaaaccaaaaccaaaaaaccttatctgctgagaaaatataaccacataaaatatggtgctacaaaatatagactgtgtgaactgaaggtgacttgcccaaaggactcctgaagcaattggctgctgtagaaattaagtccacgggaggttttttgttctgtttttttttttttttttttgagatggattctcactctgttgcctaggctggagtgcagtggcgcaatctcggctcactgcaacctccgcctcccgggttcaagcgattctcctgcctcagcttcctgagtagctgggattacaggtgtacaccaccatacccaggttttttttgtatttttagtagagacggggtttcaccatgttggtcaggctggtcttgaactcctgacgtcgtgatccacctgcctcggcctcccaaagttctgggattacaggcatgagccaccgtgcccggcccatgagaggttttgtttgcacttcaagaaggacagaaaaaggcaggcaggctggggagcaacatagtaaggctgaggaagtgataggaaaacagcctccaaaaggtttccctgtagattctgactggctaagtttcctgaaataatattaattctgtcctcttgcttttaataggacataacgactatatgtgtccagccaccaaccagtgcaccattgataaaaacaggaggaagagctgccaggcctgccggctccgtaaatgctacgaagtgggaatgatgaaaggtggtaggtacatctctcccaggggcccttggggatggccctggccaccgcccagtgctggctctacccattggaataacaccatgggaattttgtgtttttttcttttaattgttttttttctattcttatttttctttgcaacaaaagtattttcataatccattttattttaaaaaggtggaagtgtctggaactggaaattctaacatggcattttgtgttttggattttcaatgtaaataattatattttaaatcaaaggtgtgtgggaggcggtgatggaaggaaacgaagagtgcttagtaaattattctagaaatatttttcagttactgtttatgttgcaaatgctagaaaatgatatctgaggataaactttccctaaattgagacttgtaaatgtgaaagctgagtagctaatttatagccttccagtctgttatcatcccttaaggaatgtgaatttcaatcaaaaggcagttttctcctttagaacctgagtgaaccagccactttcttaacctcagtgtctagcatggtgctggcatagttgattactgagcactacactaacaagtgtcagagcatgcatggtttgtgactgtgggtttgtgtttttgtggtctttgtggctgtgtgtgtgtgtggttttctgtcttctcatgtatccgatcttccagttttgtcatacaggaatctggaaactgaatcccagttctgggaatattaggagccccataaatgtggttgcctgattgacctcattgtattcttgggagtctcatcttgaggaacattgcttctagtcttggatagccttcagtgtagtggaagagaacaagtagaaaatgtgtaattaaaataaagtcatgaggctgaggtgggcagatcatctgaggtcaggagttcgagaccagcttggccaacaaggtgaaaccctgtctctattgaaaatacaaaaattagctgggtatggtggcgagtgccagtaggcccagctacttgggaggtggaggcaggagaatcacttgaacctggcaggtggagggggcagtgaactgagatggcgccactgcactccagcctgggtgatagagtgagactctgtctcaataaataaataaataaataaataaataaataaataaataaataaataaagtaacggattcatttagtgtttcagaaggatactgaagggagggaagggctgatgatggtgctacctgctgattgtaatagggaaaagcccgtttcttttctgaaggaggtgaagcttggggtgatttaaggagaacaaaatttcaatgaaaaggaatagtgattttgcaaatagtgggcagctaacctttaaatcattcttactgggacgcaggaggaaggagaggaaagaccaagaatggagattatgatgaagacaagcttgattgttaacaagcttacagtgacaggtttcatagtcccggggtcataaatacgccagacaggttgaggtttggaatgcagcatttggaataaattctcctggtgaagagatgcaatgttgaatttacgcattctgtgagctgtgactatgactatacatcttgaacatctgaaaaagcagctttaattcaaagggtaattaattccaagaatttaacagctacattcagaaaatgacacttgagtcatatggattaaatatttaaggaattcatctttctttgtactgttggagaattagtcaggcttaattaaacttacaaaatgcgtcttaaggtaacttggtaagtgacaggaatataacagctgcataagaaaagctttatttgaaacagtggagtcgaggtttaatattcttctttggcgattatatgtaggttaagcacaggctcttccatacattctccttgaaagctgaaataatcaagtcatgaatatgtccaaaacaatttttaaaatgtgaggggtacccatgcattgaccccatttcataaaaccgattctgtttttttttttgtaattaatatccagatacggtctggctgcatgaatataaattacgcattctcatttttaatctaacaaaaattcatatatgcaaagacataataaaagtctccccactgttttctcctaggaatctagataatttgactgtacacaacagactgtggatggctccatacacacttgcacatgtatattgatgactgtaaaatatatatctgtattagttttctagggctgccataatgaaataccacaggctgggtggcttaaacaacggaaattaattttctcccaattctggaagctggacatgcataatcaaagtgctggaatatttggtttctagtgagccctcccttttttttttttgagagatggagtcttgctctgttggccaggatggagtgcagtggcactatctcagctcactgaaaccttcacctcccaggttcaggcgattctcctgcttcaacttcccaagtagctgggactacaggtgtgtgccaccatacccagctaatttttgtgttttttttttttgtagagacggagtttcactctatgttggccaggctggtcttgaactcttgacctcaggtgatccgcccacctcggcttcctaaagtgctgggattataggcgtgagccaccatgcccggcctgtgaggcctctcttctaggcttgtggctagccgtcttctgcctgtgtcctcacatggcctttcctctgcgtccgagcactcttggtatctctttctcttctcacaagccctgttggattaggagtccacccttatgacctcatttaaccttagttaccgccaaaaaggccctatttccaaatatagtcataccaggggctagggcttcaacatacaagttttgtggggacacagttcataacaggctgccctcccaaaataccatagactgggtggcttaagtaacggaagtcaattgcctcatagctctggaggctgaagtctgagactaaggtgttggcaggtttgatttttcccgaggcctctctccttggcttgaagatggctgccttctctctgtgtccccacatggccttttctcggggcatccacagcttcttcttcttcttacgaagacaccagtcatatcggattagggccccacacacaggacctcattgaatcttaatcacctcacttaaggtacaatttccaaatacagtcacattctgaggcccagggggtaagatttcaacatatgagttttaagggtacacaattcagtatgtggcaatatcccataggggttactcagtgattgttcagtatttctttacatgtaaggaaaacatgtatctttctggcagtttttatatgtacataagttttaaatgaagctttaaattcataaaattatagcccgtgagaacatcttattttaatgatatgtataaagtacttgccataaatcaatataatttattgtattttctacaacatggaataccacacatggccacaggataccctctataacaactccttgaaaaatcccattgaataaagccttaatttacaactggaagtacaatgataactaactataaaatgtgcagtcacatggcaaaggccagctgtgactgaataaatctttacaacatgttttcaaccattagggttcacaacaatccactttcttaaccaggctggttaccaactaggatattgaaactctacctatgaaataaaaagtttagtttcagttaaaagagaaccacagacctactccctattttcatagcaaggctgaaaaaattcactgaagatctattgtaaagatccaaaagagtgcatgatttgtctccatgaactaacaattttaatctgttataatacttactgcctctgaaaatcccagcatcattattagatttggttctgaatcatggtagttctataagatgcaggatttgaattgcactttcgggaatgtgcttttctatcctagtacatgtgctggtttctctgcattgctttttcctcttcatttgtctccttcctcttgaactttaggttgtagattacatgtctcttcttcaggaaggcctacacagttacctgacagttcctgaggctcgaagttcaaaatcaaggtgctggaaaattcatgttctagctttaatggcaaacagctcttctcttagctcttatcaccattattattagtcattcaatgtctgtctttacatatggtccataaactccatgatggcgcgggggtggggggtctctgtgtcttgtttaccgatcttgcatgaaacaagtcacaaggtaggtgttcaagaagtatttttttgcactaattaatgaattgattcaattcatttaaatagttatttgtgtagggcttcttatatgcaaacccttgggaataaagcaaatatgaataagattgtagtcccttccctcaatgtcctcacagtataaagagaacatttgcatgggaagcggcaaataaaaatctcaacggcaagtggagactgggttgcaagatggctcaaatattgaatgatcagaatgggagtctagagctttaaacaaccactcccaggtttagtccaactcagagtattactcagacacctgacatccaagacatatattattactcaagaatgtggcctttttgctgagtttggtagaaagaggaactcttccaaagataaatgtgttcaaatgctggctcctcctcaaacttgctgaacaaccttgttaaagtcacttttatgagcttcactaatttcaaatatgaaatggagataaataaattttattgtccaagcacggtggcttacgcctgtaatcccagcactttgggaggctgaggtgggcggatcacctgaggtcaggagttcaagaccagcctggccaacaaggtgaaacctcgtctctacaaaattagccaggtgtgatggcagaagcctgtaatcccagctactcaggaggaggaggcaggagaatcacttgaacccagtaggcacaggttgcagtgagccgagattgcaccactgcattccagcctgggcaacagagtgagactctgtctcaaaaataaatatataaataaacaaataaataaattttacttaatgagtttgtcatgaagatgacaaatcgtaacatgggaaaatataaatctaaagtgccacacaagtgttagctattacatatcttttttgtcttaaaaataattactatcttagttaaaaatttcatcatatacgagcactgctgggttttttttttcagctgaaagaaagagaatggcaatttcatcacttctacaagatataaatttctaatttctttgtggagaataaaaacttggcttaaacacctaagcttttttttcttttctgatctcatatgctgaatatagctgaatgacaagtgagatgtgttatttatcattttatgatgccagagatttacacgaatttgtgaaaggttttttcttaccatagattcagaggcgtgtttgaggcaaggttttcattgtgcagtgaggaaattggcacatagaaatcaattgatgtgcaggactcttggactgactattctggttatgtttccttataacacattaagaagaaatttgagataaagtagtaattgtcaactagtctttatttattttaataacaaatgttgcagtataatttttagaaatattccaaaataacaaataaatccaaaaattaacgggataattttaaagtgagaaaataacatactactaatatagacagggaaatatacatgtgtccagaatgattcagaagcccaatgaaacactggaaaataaaatattttcctgttgcttgggtttaatatttatcactatgagttatcgtaatttgctttattgatggataaactcccaacctggggactgcgattggaatcctctttaatcctacattggctatcctttatcaaaagtaaacaaccggctggccatggtggctcacacctgtaatcccagcattttgggaggccgaggcgggtggatcacctgagatcaggagtttgagaccagcctgaccaacatggtataacctcgtctctactaaggatacaaaaattagctgggtgtagttgtgcccacctgtaatcccagctatttgggagcctgaggcaggagaattgcttgaactcaggagacggaggttgcagtaggccaaaatcacaccactgcactccagcctgggtgacggaatgagactccatctcaaaaaaaaaaaaaaaagtatacaaccaattattaatgttcatgatggtagaatcaaattaataaattaaaaatgtagatgtgaattactttttttggattgccgaataattgtggaagatttgtagctgcatgtgaatccaagtttcctcaaaaggtaggttggggtgctcctatttaggattgaatttaagaaaaatgttaaagaaaagctagctgctctttaccaaagagagactggttgttttaagcagtaatctaatctatatatttatgatattgaaactattattttattaattcatataatagatatttattaaaaactccccatattataattttttatttgcaaacaaatatactgaatcaagtaagtgaatcacatatggaccttaaagactaatgaatccaatgtttgacagtattttatatcaatcaagctctggtttccacaagcagaagcagatcgtcatctatgaaacagataaaagttgatttggcataccctctctttattcattatgatgttcatgagaaaccttcttagaaccctagggctccaaggaacacagtttgcaagccactgatctaatctaactccttcatcctctaggtatgaaaatcaaggccctccattacctattagggatgaaggcaggtcagcctctgtgactgtcagttcagctggaggaagcatgagtgtaggcagcacaacaatccctataaggaccatgttcttaagctggttttttttttcctagtagtttttacagtttcaggtctaacatttaagtctttaatccaggttgagttgatttttgtatacggcatgagataagtgtccaatttcattgttcggtgtgtagatatccagtttctctagaaacatttatcaaagaaactgtcctttctccattgtgtgcttttagcagctttgtcaaaaattaattggctctaaatgaatgaatttatttctgggttctctattctgttccattggtcaatacatgctgttttaattactatagctttatagtatattttgagtcaggtagtgttatgcctctagctttgttcttctagctccagattgttttggctattcagggtttttttgtggttccatacaaatttttggattgtttttccacttttgtaaaaaatgtcattgcaattttgataggcattgcattgaatctgtagattgatttgtgtcatatggatatttttaacaatattaattcttccagtctatgtatggtatatctttccatttatttgtgtcttcttcagtttcttttattgatgtctatagcttttagcatacaattctttcacttccttggttaaatttattcccaaatattttgttttatttttatagctattataaatgaaatttcttcttgatttctttttttggatagtttgctgttagtgtatagaaacactactgatttctgtatgttgattttctcttctgaaactttactgaatttgtttattagttctaatagttttttgtgtggagtctatacttacatgatctatgtgtaagatcatgtcatcagcaaacacgggcaatttaacttcttctttttcaatttgcatgcctttattttttttcttgcataattgctctggcaggaactctcagtactatgttgaatagaagtggtgagagtgggcatccttgtcttgttattgatcttaggggaagacttttcaaattttcaccattgagtatgatgttagctgtaggcttgtcatatatggcctttattgtgttgaggtacactctttctatatttaatttgttgagagtttttgatatgaaaggattttgaattttgtcaaatgcattttttcctctattgagatgattgtatggtttttgtccttcattctgttaatgtgtgtaccatagttatagatttgcatatgttgaaccatcgttgcatccctgggcaaatcccactcgatcatggtgaatgattctttttcatgtcatgacaatcaattttgctagtattttgttgtggatttttgcatctatattcatcagggatattggcatgacatttaattttcttgtaatacccttgtctggctttagtatcacagtaatgctggccttgtaaaatgagtttggaagtattccctcctcttcaatttttgggaagagtttgaggattggtattagttctttaaatatttggtagagttcagcaataaagcccattaggtcctgggcttttcttccatagaggactttttattgctgattcagtcttctttctagctattggtctggtcagactttctatttcttcatgattcagacttgctaggtttatgtgtctaagactttatccatttattccaagttatccaagttgttggtgtgtaattcatcatagtactcttataattttttgcatttctgtgctatcagttgtaatgtctcctcttttatttctgattcagtttatttgtgtcttctcactttttttcttagtctagttaaaggttaatcaattttgtttatctttttaaaaacaaattcgtagtttcactgatcttttgttttgtgtttttagtctcaattttatttatttttcctccgatctttattattttcttccttctactaacttggggcttagtttatttttatttttctagttatttgtggtataacattagattgtttgagatcttcttctttgatgaagacatttattgctataaacttccctcttgaaaatactcttgctgcatcccacaaattttggtatgttgtgtgtccattttcatttgtttcaagatatttttcaacttttctttttatttcttctttgacccactggttggttctgagtatgttgttttattttcaagtatttgtgaattttccaaaattattcttgttgatttatagtttcatattatttatggttggaaaaaatacttgatatggtgtcaatgttcttaaatttattaagacttattttgtgtcctaacatatgaactatactgttttttttctttttttttttttgagacagagtctcactgtgttgcccaggctggagtgcactggctcaatcttggttgactgcaacctccgcctcctgggttcaagctattctcatacctcagcctcccgagcagctgggaatacaggagcacaccgccatgcctggctaactttttgtattttttagtagagatggggtttcaccatttgggtcaggctgctctcaaactcctgacttcaaatgatctgcccaccttagcctcccaaagtgctgggattacaggagtgagccaccgtgccaggccatgatctatactgttttatctaacattcagtggataatgttccatgtgtatttgagaagaatgtgtgttctgttgctgttggatgaaatattctgtatgtatctgttaagtccatctgtgctaaagtatagtttaagtttgaactttcattattgattttctgtccgaataatctgtccattgctaaaagtggggtactgagttccccaatattattgtattacagtctatcttccctttcatatcaattaatatttgtttcattcatttaggtactccaatgttgggtgcatatgtatgttcacctgttatatcctcttaatgaattgaccctcttgtcattatttaatggccttctttgtcttattttatagtttgtgacttaaagcctattttatttgatataaatatagctgtctctgctttcttttggcttctattttcatagaatgccttttttggtcccttcgccttcattctctgtgttttcttaaccatgcattgaatctcttctagacatcatataacagggtcttgtttttttaaatccatttactcactgtatctctttcttcctatcttgctgtcttcctttgtgattaggcgattttctatagtggtatcctttgaattcttactttttgccttttgtatatttgctacaggattttgctttgtgattaccataaggcttacataaaagatcttatagttataccaggctatgttcaactgtttataacataactttgattaattttttaatactcaatttatttgattgcttatttagagataattttgattcctatcagaagaaaactgaggtatctttatgtaccttttcaggaatgaccacgtctcaccttaccttgaatgttacaagaaatgctggcagtgactcaaggccaggcaaaaatttcagaaagggtttatcttgtttgtacaattttcttttgcaaaaataaatgattcttgatatgatgtaaggactttttccgtagatagaacctataaaatgcagaactttggggcagtaattatatgaatgaattgctactttaaaattctgtaagtccccaggaatttccatatgcttttttttgtttgtttcagtggttgtgatcaggctaatgggtagtttttagagctgaaaagaacttaaagatcatctagtgcacctttttgtttttcagttggattgttcttgtccaaatcactaagctaagttaactgctcagacaggaaaccaagtctcctgacccatggtttaatgctcctttcattgttatgcgtctgcctggctgacctgttagtaacataaagtgtcatgagagatagacatatgcatgagtaagatattaatatcccataaaccaaaactgtgacttaggaaatgttacggtgggcacaggatattactcctcttcaacaaaaacatcaatcatatgttggcttagttgcacagcagaagtaccaaaataaatttatatagacggtgtcacagatactttaaaaagacctacttaagatttaattacctaatattatttaatatttaatataatttaaaaggggcatttttatctttcagccaaggttttaattgtttttagataattctatttttgaaagtctgattttgttttaaaatgcccattctggtatataaaaacatcattttgtcaaataggagtcccagctaagggccaagcgtgcaattaaacttgactctttacctactacctaggaaccttgggcagatcacatactttttcttcactcagtttttacttctgaaaaatgccagctgaagtatgtttcaaatcttaaattttatgttttatgatctaagttcagattaacaatggaatggttagaatccaaagctaaaggtagtatatacaagtgtatattgggggttgggagcaactgccgcagctatcatatttacatttcaagctcaatttagaacaactgcgggcaactgtaaaaaccggtaggaatgggcagagttattgtcttcactagtcattgtggaaagtgaatctcttctgaatggagagtcacaaaaatgagtttgatgctttcatgatagtgaaatgagaagatggccatatattgctataaatcaccagcaacataaaagaaaaaattcaaaaatcaagtttgttgaggcaggactctgaaaagataactaagcttttttttttttttttttctgttagagatgtaataatcatgactaagactggaatcccaagagctggtgagactttctagtttctgccttgtggaaagagaaaggaagaggccaaaaaagataatgaattttggaaagttcctgattaaatatcgcataggctagtctggttatgtctgcttgaaaacttatccagtaggtataaaccaacacacttgaggccagtctttttggaaattacagaaatatatgtcagccttaagagacatcctatgatgaagagcagagggagttgtttataaagaaatgttctcattggctgggcatgatggctcacgcctgtaatcccagcactttgggaggccgagctgggtggatcacttgagatcagaagttccagagcagcctggctaacatggtgaaaccccgtctctactaaaaatataaaaaaattagccgggcatggtggcgggcgcctgtagtcgcagctactcgggatactgaggcaggagaatggcgtgaacctgggaggcggagcttgcagtgagccaagatcgtgccactgcactccagactgggcgacagagcaagactctgtctcaaaaaaaaattagccaggcatggcggggagcgcctgtaatcccagctactcaggaggctgaggcagggaaattgcttgaacccaggaggtggaggttacagtgagttaagatggcaccattgcactccagcctgggtaacagagctagactccatctcaaaaaaagaaaagaaatgttctggtcatgcctggagataatacatggtttagtttatgcttgattcagcaaataaaaattggtgaggaacatacagaattatatttaggtgattatattttttatattttatatataaaatttatattttttatattttaggtgattatatttttaaacgcttgctttacaagactaatcattattacttttttaagttttgtgatatattttatttaactaatataccccaaatagtatttcaatacagaatcaacatttaaaaattattgatacattatgtatgtttttttccttcactaagacttccaaatcctccaagtgtttcacacttacatcttattttggaccagccagattttagtgctcatttgaccatgtgatctgtgcttaaggaggctgctggagctgaggctgggctgcagtaccaacatagaagtctttatctgtcaaaccaggagtttgagatccctgagggatatgggaaccataaaggatcttaagcagagaagtgactttcttaattttgaacctatcctggtgttctcatagattagaggagagagatttaggagtgagggatcaagcaagaaggtggctccacattgttttccatagtagttgtactagtttacattcccaccagcagtatagaaatgttcgcttttcactacatccacaccaacgtctattattttttgattttttgaaaatggccattcttgtgggagtaaggtggtattgcattgtggttttgagttgcatttccctgatctttggtgatgttgagtattttttcatatgtttgttggccactttgtatcttcttttgagaactgtctattcatgtccttagcccactttttgatgggattgtttgttttttttcttgctaatttgtttgagttccttgtagattctggatcttaatcctttgttagatgtatagattatgtctccttctctgtgggttgtttgtttactctgctgctgctccttttgtgcaaaagctctttagtttaactaagtcccacttatttatctttgtttttgttgcatttgcttttgggtttttggtcataaaatccttgcctaagcccatgtctagaagggtttttctgacgttaacttctagaattttatggttccaggtcttagatttaagtccttgatccatcttgagttgatttttgtgtaaagtgagagatgaagatccagttgcattctcctacatgtggtttggcaattatcccagtaccatttgttgaatagggtgtcctttccccactttatgtttttgttggctttggcaaagagcagttggctgtaagtatttgggtttatttctcggttctctactctgttcctttggtctacatgcctatttttataccagtaccatgctgtttcggtgactatggccttatagtatagtttgaaatcaggtaatgtgatgcctccagatttgttctttttgcttagtcttactttggctatgtgggctcttttttggttccatattaattttaggattttttttctagttctgtgaagaatgatggtggtattttgatgggaattgcattgaagttgtagattgcttttggcagtatgatcattttcacaatattgattctactcatccatgagcatgagatgtgtttccatttgtttgtgtcatctatgatttatttctttgagaggtgttttgtagttttctttgtagaggtccttcaccttcttggttagtttttgttttttttggtttttttttttttttgcaactattgtgaaaaggagtgagttcttgatttgattctcaccttggttgctgctgttggtgtatagcagagctactgatttgtgtacattaattttgtatcctgaaactctgctgaattcattaatcagttctaggagctttttgggggagtctttagggttttctagttataaaatcatatcatcagcaaacagcgacagtttgaattcctctttactaatttggatgtcctttatttctttctcttgtctgctccggctaggacttctggtactgtgttgaatagtgagagtgggcatctttgttttgttccagttctcagaggaaatgctttcaacttttccccattcagtattatgttggctgtgggtttatcatagatgccttttattacagtgaggtaccttgtataccgattttgctgaaggttttaatcataaagggatgctggattttgtcaaatgctttttctgtatctattgcgattattgcgatggtcatgcgatttttgtttttaattttgttcaggtggtgtgtcacatttattgacttgcatatgttaaaccatccctgcatccctggtatgaaacccacttgatcattgtggattatctttttgatatgctgtttgatttggttagctagtatttcgttaaggatatttttttgagatggagttttgctcttgttgcccaggctggagtgtagtggcactgcaacttccactttctggtttccagcgattctcctgcctcagctccctgagtcgctaggattacaggcacctgccaccacacccagctaatttttgtatttttagtagagatagggtttcgctatgttggccaggcgggtcttgaactcctgacctcgtgatccacctgccttggcctctcaaaggactctcaaagtgttgggattacaggcgtgagccacagcgcccggccagatttttgcatctatgttcattaggaatattggcctgtaggtttctttttttgttttgttctttcttggttttggtacaagggtgatactggcttcatcgaatgatttagggaggattccctctttcttcatcttgtggaatagtgtcaataggattggtaccaattcttctttgagtgtctggtagaattcagctgtgaattcatctggtcctggactttttgtgttgttggtaatttttaaattaccatttcaatcttgctgcttgttattggcctgttcaggatttctaattcttcctgacttaagctaggaggtttgtatctttccaggaatttacctatctcttctaggttttctagtttatgtgtgtaaaggtgttcatagtagccttgaatgatcttttgtatttctgtggggttggttgtaatatctcctgtttgtttctaattgagcttatttggaccttctctcttcttttcttggttaatcttgctaatggtctatcaatttcatttatcttttcaaataaccagcttctttttgtttcatttatcttttgtatttttttttcaatttcctttagctctgctctgatcttggtattttctttcttctgctggctttgggtttcgtttgtttttatttctgtagttccttgatttgtgaccttagattgtctatttgtgctctttcagagtttttgagtaggcatttaaggctgtgaactttcctcttcgcattgcttttgctgtatcccagaggtttggatggttgtgtcactattattgttcaattcgaagaattttaaaattttcatcttgatttcattgttgacccaatgatcattcaggagcaggttatttcacttccatgtatttgcatgttttggaaggttccttttggagtcgatttccagttttattccactgtggactgagagagtagttgacatagttttaattttcttagtttttttgacacttgtttgtggcatatcatatggtctatcctagagaaagttgcatacgctgatgaatagaatgtatattctgtggttgttgggtagaatgttatgtaaagatctgttaagtccatttgttccagggtacaatttaaatccattgtttctttgttgactttctgtcttgatgacctgtctagtattgtcagtggagtattgaagtcccccactattattgtattgctgtctgtctcattacttaggtgtagtagtaattgttctatacatttgggagttccagtgttaggtgcatatatatttaggattatggtattttccttttggacaaggccttttatcattatataatgctcttctttgtcttttttaactgctgttgttttaaagtttgttttgtctgatataagaatagctactcctacttgcttttggtgtccatttgcatggaatgtctttttccacacccttaccttaagtttatgtgagtccttatgtgttaggtgagtttcttgaaggcagcagatacttggttggtgattgcttatccattctgcaattctgtatcttttaagtggagcatttaggctatttaaattcaatgttagtattgagatgtgaggtactattctgttcatcatgccatttgttgcctgtataccttggattttttttagtagtatttttgttttatacctccaatgagatttacacattaaggaggttctgttttgatgtgtttccagcatttgtttcaagatttggagctccttttagcagttcgtgtagtcatgtagtgctggcttggtagtggcgaattctcttagcgttgtttttatctgaaaaagactgtatctgtccttcatttaagaagcttagttttgctggatacaaaattcttggctgctaattgttttctttaaagaagctgaagatagggccccaatcccttctagtttatagggtttctgctgagaaatctgttaacttgatgggttttcctttataggttacctggtgcttttgcctcacagctcttaagattatttttcttatcttaactttagataaccttatgacaatgtgcctaggcaatgatctttttgtgatgaatttttcaggtgttatttgagcttcttgtatttggatgtctaggtctctaataaggctaaggaagttttcctcaattatccccccagatatgttttccaaacttttagatttctcttctttctcaggaacaccaattattcttaggtttggttgtttaattctgtcccaaacttcttggaggttttgttcatttttttttttttttcttttcttttttttttttaattgatcattcttgggtgtttctcgcagagggggatttggcaggatcacaggacaatagtggagggaaggtcagcagataaacaagtgcacaaaggtctctggttttcctaggcagaggaccctgcggccttctgcagtttttgtgtccctgggtacttgagattagggagtggtgatgactcttaacgagcatgctgccttcaagcatctgtttaacaaagcacatcttgcaccgcccttaatccattcaaccctgagtggatacaccacatgtttcagagagcacagggttgggggtaaggtcacagatcaacaggatcccaaggcagaagaatttttcttagtacagaacaaaatgaaaagtctcccacgtctacctctttctacacagacacggcaaccatccgatttctcaatcttttccccacctttcccccctttctattccacaaaactgccattgtcatcatggcccgttctcaatgagctgttgggcacacctcccagacggggtggtggccgggcagagcggctcctcacttcccagtaggggcggccgggcagaggcgcccctcacctcccggacggggcggctggccaggcggggggctgaacccccacctccctcccggacggggcggctggccgggcagaggggctcctcacttcccagtaggggcggctgggcagaggcgcccctcacctcccggactgggcagctggccaggcggggggctgacccccccacctccctcccggacggggcggctggccgggcggggggctgacccccccacctccctcccggacggggcggctggccgggcggggagctgacccccccacctccctcccggacggggtggctgccgggcggagacgctcctcacttcccagacggggtggctgccgggctgaggggctcctcacttctcagacagggcggttgccaggcagagggtctcctcacttctcagacggggcggcccggcagagacgctcctcacatcccagacggggcggcagggcagaggcgctccccacatctcagacgatgggcggcagggcagagacgctcctcacttcctagatgggatggcggccgggaagaggcgctcctcacttcctagatgggatggcggctgggcagagacactcctcactttccagactgggcagccaggcagaggggctcctcacatcccagacgatggcggccaggcagagacgctcctcacttcccagacggggtggccccgggcagaggctgcaatctcggcactttgggaggccaaggcaggctgctgggaggtggaggttgtagcgagctgagatcacgccactgcactccagcctgggcaccattgagcactgagtgcggttttgttcattttttaaattcttttttctttgtctttgttggattgagttaatttgaaaaccttgtctttgagctctgaagttctttcttatgcttgttttattctattgctgagactttcaagaacattttgcatttctctaagtgtgtccttcatttcctgaagttgtgattgttttttatttatactaactatttcactgaagatttctcccctcatttcttgtatcatttttttgacttccttaaattggacttcacctttctctggtgcctccttaattagcttaacaatcgaccttctgaattctttttcaggtgactcagggatttcttcttggcttggatccattgctggtgagctagtgtgattttttgaggggtattaaagaaccttgttttgtcgtattactgggattgtttttctggttccttctcatttggtaggctatgtctgagggaagtactagggctcaaggctgctgttcagattcttttgtcccacaggttgttttcttgatgtagtactctcccccttttcttagagatgtggcttcctgggaaccgacctgtagtgactgttatttctcttctggatctagccattcagcagggctaccaggctccaggctagtactgggggctgtctgctcagagtcctgtgctatgggctgttttcaggtctcacagcgttggattccagcacctgctctgatagaggtggcaggggagtgaaatggactctgcaggggtccttagcttttgttgtttaatgcactatttttgtgctggttggcctcctgccaggaggtggcactttcaagacagcgtcagctgtggtagtatagggaggatcaggcagtggccagggccttagaactcccaagagtatatgacctttgccttcagctaccaggatggatagggaatgaccatcaggtggggcaaggctaggactgtctgagctcagactctcctcgggtgagtcttgctgaggctgtgctgtggggcaggggggtgaggttcccaggtcaatggagttatgttcccagaggattatggctgcctctgctgcgtcatgcaggctgtcaggaatgtgggggaaagccggcagttacaggcctcacccagctcccttgcaacccccaaaaccggtctcactcctgtgccctaccaacagcatcaagtttgtttgcaggcagcggatgagcaaggctaagaacttgccgcaggctaccagcctcccagcaaagaatgtaagtagggctttcatgcctcccttcctgttgaatctgtacaccaaattcactccctcccccaagttctggccaggtgacttcatgtttggttggaattgttacaaagttcagctggaggtttccttctcgctgtggtcttttcccagttcctctggccaccctccccaaggacccctgtgagacaaggtagaaatggcttattaggggacccagagagcccacagggcttttccccttgctttctctaccctttatttcactcagctgtctaattaaatcagctccaggtaagttcatatccttctcccatgatctggagctgcagattccccagtgagggtgtgtgttcgggggtgggctatccccctttcctactttcacagcttgggcactcacagtatttggggtgtctcctgggtcctgtaggagcaaactgcttccttcacagggtctgtggattctcttggctttcctggtatattcctgtagtagttctggagcagaagtttatggtgtgagtttccacacactgctctgttcatccaagtgagagctgcaatctagtcctgcctcctttccaccattttttggccttgacgtattacatttattttatgtttgaagttttggcagttttattttgaaaattttacataacaaatgccaagccaaatccaaacttcttggcctaaatcatttacagataacctttactgagcatttactacatgaaggtgttgttgacacaggggatttaagatgtgatcactgaccacaacatccaggcaacctaaaagtgaaaagaggtcattcacaaaaaataggaccaaacttcctccattcctcaagggacctaggactggagttggcctaaaaattcctgctgtatcacctcacccaccagttttgatcttgctctcagggatcaaggaagctcaaggtttctggcccttttggctcatgttcttggaggtatattctattgtcaagttaaagtcgtacccatcctagatctgtttctctctctttgtggttccagtctcatagaaaacataactatgtgaaaacaccaactaccccataaagctattctgagactcaaagacatgaactctattttgataatcacaaattgatgtatagatgtcagatatcattcatgtattatgtagcattgtggtttaagtcttagctgttggaatcagactacttgcattcaaattttagctctgttgataggtgtgtaaccttgaacaagatacgtaacctcttcagacctttgtctctttgtttgtcaaataacgacaataataatactaacttagtaagtatgtataaggaggcatgtaaagcttctattgtatttggcttatggtgagcccttcatataaattggttacaatgggtaatgaaaagtacgttcaatttttcccacaaggatttaatctaatctctaaataaaatgccagttttagtatactgtcatcattataaggaaactataattcttaagtaattaattactttggttccctttggataattagtgatacataaaatgcagtaccttgccctgaggaacctacaagttagcctccctctaatcctggcattcaaagtcctccaccttccgaattacacctgttttttcaggcattgtctcccactttcctagcaagcctttggctccaggaaactgttctgttcattgacgacagaatgtattttgtcccgtatgcctcccttcaatctgaagttcatttttagtaattttttttattagtagtgactttccccatttactaatgcctttctctttagctcatttagaattccctggaagtcatcatgttttccttctgaattgctatcatattctgtctctgtgtctaatcagaaagttaggtgagctgctgtctcagctcctgtgttaatccaggtactgagctctttgtaccctgccagcttgagggcaacttggatgcgctggtgtgtagtgatttgcaactgtgagagagccgtttccatcaacaagtgacagcttttggttctaaacactgcttgacctcattctggtttgaacatatactttggcctctgccctctacctcacctccagttctgatcttgggcatgccacagaaccccatctacactaggctttcattttggacttctaagtcctttacttgaccacttattttctttaattgctagacttaatcatccatgcatatgacagccactcagctctgaccccaatacttcattgaggctcatgccagtctgacctctcacagggaagagcacccctgccggtgagcccctggcccttggattatgctgtcccaccagtgcccagctggctgcttggcactgcatgtgatgtatctttgtttattgatcgcttaattgaatgggatataggattatattccatgttccagatcaagttgagccaagctgacaacttagtattaaaaaaatatatttatctcctatctgtccaattaaaattttaatttctagaggtagagacagtcacattgctatttaattcctagcacagcagtatttttgtcaatatttgttattagtggtgagtttaaattataaaggaaaaaagagaagtggtgatttatgtcagcgcttggctaaactattcccttgatataagtctattattcaggtcacataagcatgactgaagtaatatcacaaccataatatcataattatctctcttgctgtctctgtcactttctcacttttgtttgtgcatagtgcatagacctgtagaaaatttattagtaatctgaagcataaaaccaaatattacaactatcataacaaataaataaaactgtgcactcctttagggagtagtaaagccatttctaaaattaagtcaaagtaagattcccttattattgagatattttagtggtatacactatcataagtaagatgaataattttgttagcagctgacactgctatatagatatttatcttgggaagttctcagtgtaacatctttactgtgtttttctctttagattatacttttatgtttattattttgtttcgtgggggattcaaaaatatgcattttatgccatacttggggattccctataaattattagttgtaatatgacagttccatcatgaattttccaggtattcttttatgcaagcagataatagctcattttggtttttaacacattcatgcatattctttctctctcaataaatatggttttaatttattaaatgaaagatttaaaaatgtgctaagcattttaataataatcgattttggattaacttgttatgtttactctagggctgtagttcaccatttattcagttaagtccttccccaaattcaatattgaacatgtggaattgattcgtttcacgtggatgtatcatttactcccaagatgttggtttttggcatttagtactggtaatgggccaggaaagtgctcatctatatttgttgttattcactgattgcatcttgcccttgcacccactgagacgatgggaaagtagcaacaatactaggtgatttctttgatttaaacccaattaaaagaattagagagttgtctgatacaaggccaaagaactaagaacagaaacaaaagcaaaacaacaaacagcagcacaaactccagtgagataaatttttaaaacattgggaatatttaaaaaataaaaacactccaatgaaccacccaggttttattaaagagtagagaactcaaacagcagaaggcagagctggtggaggaaactcagcaactgctcagaaatgaaacaacctaggaaggaggtgcgagtgacctgaaactccttttaaaaacagaaaggacaaaaagaggtatgggctgacaaaaggaaagtggtagattactgatgtattgcattatgcttagaatgtctcagaatgcgagaggcagtaaacacaccagaagaggatacaatatccggaccatgtgcaactgcaaataaatgtttgggttaaaacttggttgattctaaattacatgaagagctgatgataattgaggcagaactgatagacctaacaatagaaaaaaatcgatttaaattcagagaagaggtcatttaagaaagtataatgaagccacttaataaaaggaaatattcctctaactaaagtttgagatttagggcataatcctcaaagacaggctaatataatctattttttgattaaaaaaaggaacttttggtttaaagtaagatgttcagctgctcttagagtttatttctccatatttgggcatataagaatttaaggaaaaatatagaaatataagaaagatttcatgagaatcacaagcatagtttataggcaagatagccttttctgtttgaaagcgaaaaatactatttcaacatgtaaaaacctaagtcagttttcactggcatgtcccacaatcatgcctgaaataatggttgaagacagatgtgagacatttcaagggcaatagattaatacatgaaacccacttatgcctagcgttccattattggaacgctaagcatgtgggagttatttatatcctattgctcaaggtcatctccaaggtctgagttttcactcatgcaaaaattcaaaaaattgcaacctcggcgtaaatgggttaacaaaaagttaatgctggacagtaaaataaactactaaattagacacaccatattttttaaattataagagattaagaactatgagatatttaaaaagccacccacagaagtagtaggacaggtagagaaggataaattctaacaatcaactgtatctccaccccaccttgtaaatgacaaattagtttacttagtcaattcaggaaattaaacgtatacattttgtgttaaaacagaagactttttttaaaaaaagtgtgttagttaaggttaattttgacctagttaagaaaaagcagtttagagtcttgaaatggaaatgagaaatacataattacccttaaaaataagttgatagtgaattttatctaggattcttaagacatttttaatatttaatgaaaatgaactacacaattattaaaaaatagttgcctgggtttagaaaaatgatcccttaataagacatatacaacagcctgaatttttatttccaaatactatagcaacaaaataccggcaagaaaaatgcacagaaacattggatagtctcttcttactaatcttttacagatatttatatattctgaattctaacttttaatttattttatgtattataaatgtcatctagtatgcagcttgactttgctttatggtatcatctgtttcacagaaaattttaagttgtggaatttatcgtattttttctttatagtttgtgctttaagacctgtctaataaatctttccttccctggacgctataaagttatttgtctatattctgttaaaaggaataaaactttgctttttttcacattttgttacttatttcacctgaaagagaattttgtttattatgtgaggtaggaatataacttaatttttttccattgaataaccaaattgtcccagagcaattaagcaatacattctttccctgttgatctgtgaagctacctccattaggcatgaagttgtcctgttgaagagaatctgattctgagctctcttcactatttctttatttgtctatgtctacactaaaagcaatttaatttctgtgtctttataattactttgactttataatccttgaaagggactttgttcttcttcaaaattgttttggctatttatggctacttttgctttcaaatgagtttttaaatcaaactttaatgagattgcattaaacttataaattaatctgaggaggattgacatcttcatgatatttagtcttcctacccattaacattatataactctccatttattttaggtctttttgaatgacttctaataaagtttttcaattttctccaaaatatcttacatattaaaatttactcatagctgtctcatcttactgatattttaaagacatatctttttaaaaattatattattaaattgtttcaggtatgtctttttttttgaagttttacaaatttgggattatactgcctcttcattcaacattttcccatgctgttggggatccttcaagtcaaaattattagaggagctgcattaatattccagcatggacatactataatttatttaattatttcccgaattgtatgtttttgtttctaacttcacagttttcaacatgactgggaacagcttttcttgctaaatccttgcacgccacagtaattatctcactgggccaaaagataggtactttttcatgactttcgccatatattgtcaaaatggaaccaatggtgatttgttcagaaatcatggtacatcatataaaaagattactctgcaagcatcacaaactgtgatatatagaaatgtgtttattgacatgaaatagatcatgaagaaagtgattacaaatggtatttaagcattttaagttatataggcttatactgagcaataacaaagagggtgaataaatgaatgaatatgtgattctggaagggtatgtaacaaaaggttaacaatggttagccctgggtaaggggattatgtatgacttttatttccttctttttttcttcctttccccttatgtttttaacaatgtacatgaatcgtttatgaataaaataaaaaactttgatattcttatataggtttagtaggataacatttctccttcatttctttcatttttagaaatctttcttcacggaaattcttttttttaaatgtttatttctgtctttgaggagtgagattgactggctatcttttaatacctgtgtgtattatcattattgtatcttgctgataaatttcacaacagttaattattttattccccatttcatacttagctctattttaggcaagttcacaaatatcattgaatgagttcattcaatgtcatcatgatgatattgaaatgtcaatagcagatgacttgtttctggggtgttaatatgcctgttggttacatttgtgttttttggtgatggaaggcagccactgaggcaaacagcaagaatacagctaagcctctaactgcatactcttctcactcgttgcttaaaactgaagcgtggataattggtgtgcattccctaaaaagttatgtcatgatgcagtagagaaataagttaactttcctatccctgtatcaaagtttcttttgaaggtaactgagacagcgccaaataaggagcagagtttctgtgaatcatgaaatctttctaaacaattgagaaaaaaaaaactgttctgaaacaaaaacttgtgccctatccttttatttgaatgtgttttcttaaggccacaactggcagagatttgatgattttatgtttaaagcaattttttttttttttcatagcaaggagtcccactgccatcaggttttgtttttggagagattctgtaactgacatagggtaacttactctgatggcttgctccacattcactacaagtacatactgttctgaaaaatctcaaagttgaaatatttttatttgggcaacttctgcaatcaaggtaattcactctatctttggagaataaaatggaaaagggcaacccaatctctgtgaccttaaacttccactgaaacttagagacggttagcttagctggtgagagcgtgctgctaataacaccaaggtcgtggtttctatcccattacagggcagtcaagctcaagggaaaaaccctgttctttggcacagcttccatggcctgctagccgtttacagcgaggcaaaagagtagagatgttttagtgaactaggccatgacttggggagtctccaccttgaatctggttgtgggaccaaggaagagaatctgctgaggctgggtagagagactctagagcaccttaggccacaggacagcagaggatgagaataacagaactggcttcagaaagtaggtgtcagtccaaggcactgtattcaatacatgtagcaaagaatgagcttctgacaccaggaaagtcttcagatggcagtgactgcataaaccggtgtcaggatgtctgactataaaggatgggacaccttccatcaggtgagagctctggaggtggagtctgttcctggaagaagcatgggtaaatgtcatcaaaggttccctcagccaccactgggttcagggctgaggtgcacctaggaaggcttgggcagaagcatgacccctggaacttggccaactgagccatcagagagtggtgcaggtgaggagtggtagatgtgtagtgaaccactcagctgtctgcccaggccttgggtgtggaagtagagtcttctgtgtctttgggcagactgaattataagcttcaccagatcgccaagctaggaatgttgacatacctggcttggggtcagggagggactgaactgtaggtggggggccccaacaaatctaatcataagaatctatgagcgtggagacagaaggaccaaagaagggatgctgtaaccaattatcattattgaaaaactaggcagagattacattcaattggcagtaccaccctttttatctctgacatagttccagaaggatatactatgtatctagtgtgacactgtctgatagaattgtctgaaatgatggaagtgttctgtggctacccattttgatagccactagccacaggtggctattgagcacttgatatgttgttggtgtgactgaggaactaaatttttaattcaatttaaattaaatttaatttaaatttaagtagcaacatgtggctggtggttactggattgaaccgaacagatctagatactagagtaagtggtagcagcaaatcctatattggaacaatgtaaattaacaattataaatatatgagcaggacaaagcccaaatgggcctgtactcttagttttgctatatattcaaccataactagcactcattttttaaacttataaaatgcaaactcatttggttgtgatgatgaatgctcaggtaattgttgagtttcaacacagtgacagccaggaactcattttggagacttggattgtgccacagtttgtccctctataaaatgatgatgaaaattttatcagtatctgtctcaagctgtagttaatgggccaatttctaaatattcctgtcaaattgtatagccattgttttcaaagtagttttgaaagtaggccattggtaaagcaatctattaaagtgcaggaagaaagtaatagaatctcttactttttaaagtctcattatgaaaattatatttcagtttgtatgccttcgatgtacataatatattaatacacaaatatattaatgcagcggtccccaaactttttctcaccagggactggtttcctggacgacagtatttccatggattgcagcggggatggtttcaggatgaaactgacccacctcagatcatcaggcattattaggttctcataaggagcacacagccttgagcaggtgcagttcacatatagggtttgcgcacctatgagaatctaatgctgccgctgatctgacaggaaatggggctcaggcagtaatgctcgctcactgctcacctcctgctgtgtggcccagttcctaacaggccatgaactggtaccagtctgtggcctgggggctggggagtcctgcattaatgtaattaaatatgtacatttcttgagagtgtttgttcaaatattttttcctaatagagacgtataacttagaaagtatggaaccctctggtcagtagcatattttatcaaaaaggctatccgtcgtgctaaccaatgtgattaaatgttcattttagtctcagatattttgataacataataatagggaagttatggttattgcatggcttttctttactgtattttcaataactatattaatgggttcagttgttactagttttataattctgttttattctcaatgagtcttcctgtttctccccacgtctttcctatggttcatttccctgcatctttacagctccctggaacattctctcaaatcaatcagaggcttcaaaactgggcagtctcattttgtaacctgctctgactcgcctctgggaggcctccctccccactcacagctgccttcctgcatgatgtaaaatgaatacagtgccagaaagactgatccttggaacctcttccttacttagtttctttatagttctgattttagaaatgaccattttacttccagtgcccttccccacaccagttagctgagactctatgcaggaagttcccagtgatcagaactgttcccatagctcccaggtgattctgacatgcacccggcattgagcaccatggacatggctgctgtttgttatcctcgagctctgcaaagcagtgtcggatattgcttgattgttgcacattaatctactgcacggtccggtaggtagccactagccacatgtggccatttagatgtaaatgaatttaaattaaatagtattataagttcaacacctcagttgcactctctgtattcaagtgctcagtagctacaagtggttggtggctaccattttgggcagtgctactatacaacatttctatcaccacagagagtgctgatgaataatagtactaacaactggaaacattgaaatggagaggtgaaggagagaaggcagaatataagagaaacttcaaagcattcagcgtgtctgataggcgctgtatcttacattatgtttggagcatagtttttgaatttcttaattttcaaattcggttgaaacagattttggtcaattgaagtgaaggactatgcctgctttaatttgcgtagcttacctttgtttcacgtgtctcccttattacagtgtttgtagcagcatctaactcaatccctaacttctttttggtgcagggaccatttaaaaacaatttgatcatagaggttatctcctttgcaatccatattgttttatggaacaggtgaacagctggtgacaatagcctcaaggtttctaatcccaccaaaggaaaatatggtgtcagtaattaccttgtactatgatatttgtgaaatccaagagagggctagatctcaggctctaataatacatccgtataaacatctcagtagggcaccacggaagagtcttaggatatcaggaacaataagagcgggagaatatcgaccttaatattctttacacttattaaaaagtgaaaagacagccataaagcagaatgagttcctgtcctttgcagggacatggatgaagccagaagccatcattctcagcaaactaacacaggaacagaaaaccaaacacctcatgttcgcactcataagtgggagttgaacaatgagaacacatggacacagggagtggagcatcacacaacggggcctgtcgggagttgggggactaggggagggagagcattaggacaaatacctaatgcatgtggggcttaaaacctagatgacgggttgataggtgtagcaaaccaccatggcacatgtatacctatgtaacaaacctgcacgttctgcacatatatcccagaactaaaagtaaaataaatgaaaaagaaataaaaaataataaaataaaataaaataaatgaaaagtagccattttaccagttgagtatttactgacttttggtgaaaatcactttctaagattactagaaaccttatgaccctcggcctctactcccaccacgtgcggattttcacctccacctactttgtcacgtcacatgcccttctgctctttaggacacttgtattgggttcctcccccacacgtaaacagaacacacaggtctgtgaatggacctcattatgctcatttgtctttgccaagaactattgaaaatgatcacaaatgactatgtaattataattaagattttgtacatgcatacactttatttttaacaagtttgtcctgttaaatgtcaccccattttgaatagtaacattcactggtgcaaggaagaattattaaaatgacaatttaactgatatccttgacaggtaagccagttattgtatttcataattgtgattattacaatacctatgaagattaattaggacaatttattctataggacttggttatcaaaatgatcttttttcccattttagtccatacatcttcagttttaatttccttcttccaaagaactctgagtcttgcccagtgtgatacttcagattttgtaaaaatataatgaagaagaataacatgtatcagatcttttttttaatgtactgggctaaaaattataagcaccatcaaattactagaaaattcttttaacactctgcttcttagttaaaaaatgattcctttttgtgataatcttataattttcaaagtatcattttagaaattttaaaaaattattcttgttttcattcagtccatttcatcagaacttagattttttcttccctctacagtatgtggtcttgatgtgctttctccttgcaaaataaaatctttagtttcaggatctctgtgttctattccttcaatttaaaatcataggaaaaataactatcatttccttatgtctgtctccaattcccccatcattttctgtgagccaattttcttctttttcttctgtctactgtaaggaactttttactctgctctattctctgcaattcagggctcacaatttctttgacttctcagattatcctttgtacttgtgtctactttttcattaaaaaaaaaaaggcttcggtcttattttgactttatcatctttatattgccatatttaaaacccatctgcttattgattgaaccaaacttttcatcttacttcatcatactgaatgtataacttctgaatgacttaaaaatcatcacataatgtgagagaattttctatcatattcaggtgactgcattgtaagcaatgaagttgaagaaaaatagcttataatggatataataccaagaaataataagaatgagaatctgcgtatatcatatactgggttaacaagctcacaaggcaaatcaccattttattagatatttaacaaatcatactagtactggaggaagtatagcagaaaaaaggagtatggacattgggattagctgccttgctaatcttttgtcagtccctagtgacatgcttttgggttgagtcattgttacctccctgagctgtttgtttataaaatgggggtaaatatctcagatgtttcagtgttgtgacatataaagcgtcctccatagtacataataccgtaagcactccataaggtaattcttgtccttttaaaaagtatacacttttgagttcaggacacgtacactgtaacctagttgtaaccattttaataaaagaaggttttgatcatttttgataaatgtactacatgaatagttaacttgcctttcacttcctataccaacggaaattttggtaacaaatttaaagaaagcattaggttgaatatcccatctgattaaatgtcaactaaatattgtttctggcttttaaaatatttctaattcagttataaaacaggtctattactcaggaggctgaggcaggaaaattgcttgaaccagggagtcggaggttgcagtgagccgagatcatgccattgcactccagcctggcgacagagtgagattccgtctcaaaaaaaaaaaaggtgaaatgaaaaacaaaaaagaggggtgaaatttctctgcattctccctttctgctgttgggaaagccctttcattaccaagaatgcatggaattctgcttattaatttctccatctatgtgtctctgtgaaaaatactaattatttacaattttgtaagctatgaataaggtctatgttttctctgaaattatagcaacaggagcatttcccccttatttgggccgcaatcttttcattctgattcttaccataacttctgacttctgactttatcatgtcttctgatttctactaaacatgaacagaatgaatgacttctagaaatggatacaggtgtaatacatataaggccagggaaccacttaattatctttacaaagtactaggacttcagaaaaatcaaatgatgaaatggagctagctttagtatgttctacttatcattggactattaatcatgtctgtctgatgagttacctaggacttcaactgtttttatagatttaaagaaaatattataaatgtatcttacctggatttaagactggacagctgattttggatttttttctgctaccctgttgttgatatcactgacatcagcctttgcattttgactggaggctcctttctctctttctctctctctctctctctctctataggaaaccagtagttatgtcaggttgctaagtattttcccactgaaggacaaatattctggagcagtatatatttagcatttgacatttgataaacaagcttgtttgagatattttcaatacaatttcagctttggcaattgtaagcaaaggatccagttggtaattggtgaaatgaacagatgtggacacgctgcctgcatcgagatgcattaatttttctgaaaagtggataagatcttgtgagaatgaataatggaattcaaatcagatggggtgagatatttgatattcaggaacaaatcacagtataatagatctgctactttgtttggttttaatggggagttgctaatgctgaaatatagtcagagaaaaggaacgtggaatttctatagaggagagcctggctctggggtaatactactgtccttggtggaatgttgtcttttctgaagacattggttcaattcaatacatgaaacattcatcgattattatttagaaaagctaatctactgacaagacacagagttaagtagtgaaaatacagagacctagacacagttcttattaagaaattttttaatttaggtggcatatttcagagagaaattctctgcttggggcaataggtacctcctttggaataagcatggtgagaaagaattgcttctggcagattagtgagaagagtgagatattttctttcgatgacctctctattaaaatttgagtggtaaaactttgtgatgattcaggctcttcataattcttaattttatcatcctctaataccaggacttgcccagatcaatattttaggaaacagtcatgcttgctaaacccagggatttctattaaccactagataagacataagtttgtcatgcaacaagtatttattgagtccataatttgcccagcactgggctttggtactctgggccttgatactctaggttgtgtcagagatgtctaatatatttaaggtgacagagttcacaaatgagactttatgaaaatgaatatccctttttaagtctcgagaaatatgatgtgcacccgcttgaggctttattaaatctccagcgagcatgaacttgtttgtgacccaattgtagaattgttgtatgatgactatcccactggcaggcacttcttgtccaagagaatgtaattggatgttggtgactcaagcaatcctgggaagactcctccatgaccaaattaaagacaacaggggcttggtttgtactcagctctacaccaatcagcatgagacaaagaagagatccatggcaaagtggggagactactgtttattttacaagctagagaaggaaaactgcagttcctgagttgcaaaactgctaagaaatgggagaacacagaactttacaggctgaaccttggtgtcttagttattcctcttggctacagaatgccaaccagtaggagattcatcactgagatattacagggaaatgaagccaggcaagaaaaatatgtattccctttcttctcagcccataaattttgttattaataaatcagactcttatagaacagcttgccacggctgtctctagaaatgtttttattagcagaatttttattaaaataaaatacacagtagttttaagagtgaacattatagttttaggtcataaggggtgtcatggagaacacatgtggatgctacttgccagttacttgatctaggccttgactcttggttttctgttgctcggataagttagcatgatttgacatgcagttaaaggtgtggtaacctgtgattgatttcccattcttgatgctccctgcctggacttctcggaaaatttcaaaacaattcattcttctatgagggctgcctccttggttgcttcggctaaacagtgttgagcaacaagttgggaaaggaacgttgcagtaacttttaaaaattaagttagaaacaaatgtcatcaaagtaaatgataatttgccaatatgattgagcaaaaagatgaagatgcacgctccctacgtatttgctttgcagaagaattaatttgaaaaataataacatattttaaaatgaattgtaaatataaacacatgctaattgcagaggggaatccctgtgattattcagcagtttgtgtttgtcaagtgcttttcagtcagtccattccagctcagcagggcagaggcttgggctgttgtaaacttgtgggcagatacccagtgatggggcagacatgagcaggtagggctgacagcatgtgaattgagttttcttcagtcatgctgttgcagctgctcccttccctcattgctgagtttgccacagcaggtaggaacctaactctggagcctgggatgaaggagaacccacattgggcttgaggaacaagatctgccaccctggtaggccctggttaaatctcatgcaagtgtagcaatgagagagggtatgattgagttctaatttaggaggaaaggggataatgtgccctttgcacccccaggagaaatcattgctcatctgtgcctaagtagacttatcaagggcagttggttcacaatggtgtatcaccccaaaggactatagtgttatgagaacttgccagtgtatttgaatttgggtgctggcagatgacatcatgaggtattatggttacccataaatatgctagtttattgagaaggtggtagacatgctagtggatgagagggaaggacagaagcagttagtaaacagcatctgcaacaattcagttaactggtggttgtcacagtagcatggtggaaaagttggcaattaataacttctaagaaaactgaactaatgaaccaatcctgcgtgtgctatgtgtataacctccttctcactattaacagatttgttccaaacttatataagacaatgaaaataaagcttggcaatatagggaagggatggagggataaagctgtaaatcacgtcacaggcaaattaagatataccactggatcaagggatttaatgcagaaagactgatcctaacttatttcttttatttagcaataagatttgttacttacattgattatttaaaatgagttgcattattagaaaggactattttgaagacaactataataaaatgtcagtaactgatagtagccaagatattttaaatatatcaaagttgtgtcattaatattaatgtgtcccttaatatgaagtcctgcccaggcttatttatgtattcaacagacacatacctgttgaagtgtaacagatattctggacacaagcaatggtaaacaagacagatgcagtccctgctttcatgcaatttgcaattgaatggtctttgacattttattgtgattgttttagttatttaattggagaagtttttaatttaaatttgtgttatattcagtgttaaggaacaaaaatgtaatgtgcatttctgagactcagtaacacttctggtttttcctttttcatttaaagaaaaatttagtgcccaagataagctagaatttttggaatcaagtaattgatgacctgggagccaattttattacaatagtgtttttagtggtcttagaacttttcagaggtggtagctctgaaaataacactgtaataaattcacacatacatctatcatccaataaatgttaattgaggcccactacagcattgtgttagattctgaggttacaaattgttgaccccatgtcgaacatgttgaccccatcaatgtaatcagtttgacattacacagtcatttaaacattaaagtgtcagcggatattttagttgtaattttgataagtgctctgaaggagaaaacagtgggtgttgtgaaaagcagtatttggttgattgattattatagaggatctgagaaaacttacttgaggaaggaacatttggctgaactcaaagagatgagtaggagttaagtaagcaaggaagaaaagaagacacatgaaggaggaagaatgttctagaaacacacacacacaggtatatgtatatgtacatgtatatgtatatgcatatgtcttccttagaaacatataaacagctgcaacatgattgaacttatttacccaattaccaaagcttattttgcaccatgaaggtggagataaaggctttttaagcagcaaggatagaatctttgtagtttttatttataggctggttcttctgacaactttaatttttcatctttaccaacttcatggtcttcagtacatacaatgcaatcattattataaaattatattttgactcaaactctaaggtaggatgattcagctgtgcgccatcaacatagcagcatgaatggtagagactagtcattccaaacagtgaaggggcaacgtaaaactaattttaatattatatgaaagtacttcttgcccttgactgcttttttttttttttgaagaaagcaaactttaaaaatttattttagatttacagaattattgcaaggatagtaagagagttctcatatatgcctcacccagtttcctctattatcgacatcttacattatatggtacatctatcataactaatgaaccaatattgtttcattattagtaactaaatctatactttattcagattttctaagttttcctctaatgttctttttctgtcccaggaccccatcaggatatggtatgtatagttgtcatgtcttcccaggctcgccatggttgtgacagtttctgagactttcattgtttttgataccccaggtagtttaggcattttgtagaatgcctcccagtctgaatttgtctgatgttttcctcatggtttgactggctttaatgtgttttggggaggaagaccacagaggttaagtgtgattgtcatcacatcgtatcaagggtacatgccatcaatatgacttatcactgttgatattaaccttgatcatctggcttgagatagtatttgtcaggtttctgtattatacagttactcttctccctgtccatacagtactttttggaagaagccattttgtgcagctcattttttttttaattttaattttaagttctggggtacatgtgcagcatgtgcatgtttgttacatagttaaacgtgtgccatggtggtttgctgcacccgtcagctcatcacctaggcattaaagccaacatgcattagttgtttttcctaatgctctccctcccccaaccccaatctgacaggtcccagtgtgtgttgttcccctccctgtgtccatgtgttctcattgttcagctcccacttctaagtgagaacatgtggtgtttgggtctctgttcctgcattagtttgctgaggataatggcttccagctccatccatgtctctgcaaaggatttgatatccttcctttttatggctgcatagtattccatggggtttatgtaccacattttctttatccagtctatcactgataggcatttggtttgattccatgcctttactattgtgaatagtgctgcagtgaacatatgcatacatgtatctttgtaatagagtgatttatatttcactgggtatatacccagtaatgggattgccaggttgaatggtatttctagttctagatctttgaggaattgctacaccatcttcctcaatggttgaactaattaatttacattccgaccaacagtgtaaaagtgttcctatttctttgcaacctcgccagcatctgttgtttcttggctttttaatgatcaccattctgactggtgtgagatggtatctcattgtggttttgatttgcatttctctaatgatcagtgatgttgagcttttttcatatgttctttggcctcatgaatgtcttcttttgaaaagtgtctgttcatgtcctcttccaactttttaatagggttgtttgtcttttcttgcaaatttgtctaagttccttgtagattctggatattaaacctttgtcagatgtatagattgcaaaaaatttcccccagtctgtaggttgcctgttttctctgatgattgtttcttttgctgtacagaagatctttagtttaattagatcccatttgtcaattttggcttttttttgcaattgcttttggcagttttgtcatgaaatctttgcctgtgcctatatatttattgcatagattttcttctaggggacttcaaactatgctacaaaacttcaataaccaaaacagcatggtactggtacaaatacagacacatagaccaatggaacagaatagagaactcagaaataagaccacacatctacaacgatttgaccttcgagaaacatgaccaaaacaagcaatggggaaaggattgcctatttaataaatggtgctgggagaactggctagccacatacagaaaattgaaactggaccccttccttacaccttatacaaaaattaattcaagatggattaaagacttaagtggagctcatatttaaggagtgagaagatatgctctacctctttaagggtggagtagctctataaattatttggaagtgtctattctcctccattaatttatttagtcaacaattagtatcagccatctagaacccatgaatatttatgctttgggtacagtccaatactattttattttgtagctcatcttgttccagctttggccatttggagatttttcagttggctcctgtatctctttggcttcttacatatcattgtagggttttttaaaagccttttcttactttctgtcactacaagatagttcagacttatcttctgtattttttgccccagttctatgatcagccacttctccaaggagcaataatttccttcaatgaaaaccaagatatgggctgttggtgtacttgttgttattgtgtgttgttacttctagatcctctaagctgatagtgcaaagagatatatgtgtgtgtaccaacctatatatctacacacatataaaaatatttctatttgtaaccatctgtatctatcttaggctaaacctgagtacctactgatgtctccaattctaacctgcaacagcatggaacattctagccttctcctcttacttatctgtcacttcctataccaatagtgagaaacctggctcctaccatctgctatttatttacttaattatttaattccactatacttctatggaagtttcagaattgttaatctgtactcatgtacgaaacaactttatcaactagagtatagtgtttatatacagttcctttgcctttattctaacagattccacttactcattttccgagtcacttaggttagcgccttattttcctaagtccattagtgagtttgcttcatgtatttgtcatacatttaaattcttttgtaatattgtgcattccatcccagtttcccctgacatcctaaattaactttttaagtttggatacattgtggtctattctttgttctgtaaagctttatggattttgacaagtatttaatgtattgtatcaccattatagtaatatagttcctatggaatagaatagtttctatcgctgtagcatagaatagtttctctactctataaaatatcctgtgtttctctaattcaacccctccttcccaccttgaactcctgacaacccctggtctgtttaatatctttcttttgtctcttctagaatatcatataattgaaatcatacaatatgtagctttttcagactggctactttcacttagcaatattcatgtaagtttcatctatatattttcatggtctgatagctcatttctttttaatcactgaataatacttttatttatccactcactggtgaagaatctcttgattgcttctaaattcatggcaattatgaatgaaactgctctaaacatttttgtgcaggtttttgtgtgcatgtgtattttcaaattagttgggtaaatatctaggaattcaatttctgcatcattgtggtaataatgtgtttagcttcataagaaattgccaacctatcttccaaaatagctgtaccattttgcattcccaccagcaatgaatgagagttcttgatgctcgacatccttgtcagcatttgatttttgtcagtgttttggattttaactattgtaatagatgtgtagtagtgtttgattgttttaatttgcaatttctttttcttttttgagatggagtctcgctctgtcgcccaggctggagtgcagtggcacgatcttcgctcattgcaacctctgcctcctgggttcaagcaattctctgcctcaagctcccaagtacctgggattacaggcgcctgccaccatacccggctaattgttgtatttttagtagagatggggtttcaccatattggccaggctggtcttgaactcctgaccttgtgatccacccgccctggcctcccaaagtgctgggattacagacataagccacggcgtccggcctgcaatttcttaatgacaaaaaatattgaggatattttcacatactttttttgccaactgtattttttttaattaatttttatttttattttattttgtaacttttattttagatttggggtacatatgtacatttgttaatacaggcaaatttgtgtcacaggggtttggtgtacagatcatctcgtcacccaggtactaagcatagttcttgatagttctttttcctgatcctctccccactcccactctgttccctcacgtaggccccagtgtctcttgttcccctctttatgcccattggttctcattatttatctctcacttaaaagtgagaacatgcagtatttggttttccactcctgcattagtttgctaaggataatgtcctccagctccatccttgttcctgtacaggacatgctctcgtgttttttttctttctttttattttaatggctgaatagtattccacggtgtctatgtactacattgtttttttttaaaccctgcataccattgatgggcatttaggttgattccatgtttttgctattgtgaatggtgttgcaatgaacctacatgtgcatgtgtctttatggtagaacaatttatattccactgggcatatacccaggaatgggattgctgggttgaatggtaattctccttttaggtctttgagggatttccacactgctttccacaatgggtgaactaatttacactcccaccagcagtgtataagtcttcccttttctccataacctccccagcatctggttttttttgtttgtttgtttgtttttttagtatttaataatagccattctgactggtgtgagatgatatctcatcatggctttaatttacatttctctaatgattagtgatatgtagcattttttcatttgttgccaactgtatgtatttttcaatgaggtgtacatcagatcttttgcccattttaaaagtggggttttgggctgggcgcagtggctcacgcctgtaatcccagcactttgggaagctgaggcaggcagatcacctgaggtcaggagttcgagaccattctggccaacatggtgaaaccctgtctctactaaaaatacaaaaattagtcggacatggtgtcgggcacttgtaatcccagctacttgggaggctgaggcaggagaatcactggaacccaggaggtggaggttgcagtcagctgagactgaaccattgcactccagtctgggcaacaagaatgaaactccatctcaaaatacatacatacatacatacgtacatacataaaattgggtttttgttttctttttgttgagtttgaggagtttttttgtatattttgattacaagtcttttatcagccatgtgtttcacaaataatttctcccagtttgtggcttatcttttcactctcttaattgtttttttcaaagtagaaatttaaattttaatgaagcccaatttattaatttttttcttccatattgtgctattggtgttgtatataaaaacttactaccaaattcaatatcatatagaattttttctgttttcttcaagaagtagttttataattttgcattatatgtttagatcaatgattcaccttaagttttgtttaaggtgtaaggtttgtgtataagtttttctttttccacatcaatgtccagttgcttcagcaacattttctttttatatatatcttaagggtaatcagcgcaatattttctgaaaagatgacctttttctcatttaattggctcttctttgtcaaagatcagttgaccttatttgtgtggatctatttctggacttcttactctgtttcactagtccatctgtttatactttaaccagtaccatactgcctttattactgtagcctttatggtaagtcttgaaatgaaatagtgcaagtgctccaccttcttcagaattttgttcttcttcagtattaaaggctattctaggtcttttgcccttctttaaacatgttggaatcaattgtcaatatctacaaaatagattattgggatttggatttagattactctgaatctgttaattaagttgggaagaattgacattttatcaatattgaataatatgaacatgtaataatattgaactttcaatctctattatctcttcatcattttaagatcttctttcatttttcattgttttatagatttttacatataggccttgtacatactttgttaatttatatcttagtattgaatgtactattataaatggtattttctaaactttgaattcctgttattcatgatgatatgtaggaaagaaattgacttttgtatattgacattagatcctttaaccgtggcatcattacttattagttccaggggagattttgttgttgttgttgattcattggaattttctgcatagataatcatgccatctgtgaataaagatgttttatttcttccttcccaatctatatatcttttatttctttttttgccttattgcacttgctggtatttctagcataatgtataataggaggaatgagataagatatcttagaattatcctcatcttcaggggaaagtggttagttttttgtcattaagaataatgttagctattgtttttttaaatttcctatatgaaattgaggaaatttctgtctattctgaatttgctgagtttttaatcataaatagctgttgaattttgtcaaatagttttcctgtgtcaattaatatgatcatatgacttttcccgttttcactgttaatgtggcagattatattgatttattttcaaatgttgaatttgccatcagacatggaataaatcccatttgttcatgatgtataatttattttatgcatcgtttgttctgtcttgctaacattttgttgagattttgtgccagtgctcaggagagatattggtctctagttttactttcttataatatctttatctgatttgggtattaggataattctagactcagaatgagttaggatgtgttttctctgcctgtttactaacacagattgtagagaattggcacaatttctttcttgaagatttgttagaagtaatcttgccaccacctgagccagatgatttctttagaaggtaattagttattgaatcaatatatttaatatatatagagatatttaggctatttatttctccatgtgtgagttttggtagtttgtgtatttcaaggaattggtccatttcatccaaattatcaaattcgtgagcatagagttgttcataatattcctttattatccttttaatctccaagagaccagtcgtggtgacttctctttcatttatgatattggtaatttatgttttctgtctctcttttttttttgccagagtctaactctgccacccaggctggagtgcaatggtgtgatctctgctcactgcaacctctgcctcttgggttcaagtgattctcatgtgtcagcctcccgagtagctggtattacaggcatgctccaatacacttggctaatttttttttttgtatttttagtagagatgaagttttaccatgctggccaggttggtcttgaactcctggcctcaagtgctctgcctgcctcggcctcccaaagtgctaggattacaggcgtgagccaccgtgcccggcttctttttcttaattagcctgaatagaagtttatcaattttattgctcttttaaaataaccagtttttgtttcactgagtttctttatcatgtttctgttttcaattttattggcatctgctctaatttcagatgctccttgacttatgatggggttgtgtcccagtacatccactgtaatttgaaaatatcataagtcttttgacttatgtaatgcatctaacctaccaaacattatcgcttagcctaacctcccttaaatgtgctcagaacacatacattagcctacagttgagcaaaatgatctggcaacaaaacacactatagagtattgatggtttaccccgatgatcacatagctgactgagagctgcggcttgctgctgctgcccagcattaagtgagagtattgttccatatattgctagcacagaagatctaaattgaaaattcaaaatacagtttctactgaatgcatgcatattacttttgcaccattgtgaagtcaaaaaaaataataaatcaaaccatcttaagttgggaactgtctatattattctttctcttctgcttgctttaagcttatctagtttttttcttctctagtttccttaggtggtggcttaggttggttattgatattatatatttttcttatctaatatatttacttaatgctatgaatttttctctaagcactgcttttcctgcatcccacaaattttgatgttctatttttatcttcatttagctcaaaatagtttaccatttattttgaggctttttctttgactcatacgttctttaaaagtgtgttgttcaatctctaaatatttcgatattttccagctatctttctgttgatttctaatttatttccaatttggtgtgagagcctactttgtacactttctgttcttttaaatttgttaagggtgttttgtgacccagaatgtggtctatcttggtgcgtattccatcagaacttgagaagaatgtgtattaagttgtggtttgatggagtattctataaatattaattagaccatgttgattcatcataccgtttaggtcaactatatctgtattaattttctgcctgcttgcactagcaattactgacagcggaatggtgaggtttctaagtataataatggtttgggcttgtctatttccccttttagtttcaatcattttgcttcatgtgttttgattcacttttgttaggtatacacatatatacacatatttatgattgttgtatcatcttgaacaactgacccctttatcatcatctttatccttggtacttttccttctttggtagtctgctttgcatgaaattaatatagccactccagctttatttttgtgaatgttagcatggtgtatctttctccattcctttacttttaacatatcagagttattacatttaaagtgggcattattactaggataaataccaaataaagtattttgcatgctgggcttaaaacctagatgacaggttaataggtgcagcaaaccaccatggcacatgtatacttatggaacaaaactgcacattctgcacatgtatcccagaatttaaagtaaaataaaaaataaataaataaaaattaaaaagtaaaaataaattagctgggtgtggaggcagccagctactcagggggctgaggcaggagaatcaaaataaataaatcaataagtggggctttttgtagacaacatatagtttggtctttcttaaaattcaatctgacaatttccatcttttaactggtatatttaaacaatttatatttaaagcaagtgttgatatatttgaataaaaataaacctgtgtttattaactatttcatatttgttgccaaacgcttctttttggtctttcgtagttttatttgagcaatgtatgtcataccattttatcttttctcttagagtattaactatacttcttttttttttttttgagacagagttttcctcttgttgcccaggcgggagtgcaatggtgcgatcttggcttaccgcaacctctgcctcctgggttcaagcgattctcctgcctcagtctcccgaatagctggaattacaggcatgtgccaccatgcccggctaattttgtatttttagtagagacggagtttctccatgttggtcaggctggggtcttaaactcctgacctcaggtgatccaccggcctctgcctcccaaagtgctgggtttacaggagtgagccaccgcacccggcttaactatacttctttaaagaatttttgtagtggtgccgctaaagttcacagtatacatttttaagtattctaaatacaccttcaaataacactattcctttttacatgaaatatagggatattataacatagtattctcaattcctccttactgtcccttgtgacatagctgtcatttatttcatttcacttacctatatactataatcacctatacattgctgctattatgattttaaacaggcagttattgtttacgtcaattaagaatttagaaagaatttagaatcctgtgtaaaataaatttccttttattttaccttaattcatgcattctctgattatcttccatgctttatgtagatccaagtttctgacttatatcaccttcctcttgcttgaagaacatcttttaacatattctgcagggcaagtcagctggtgatgaattctctgaatttttgtctgatttttttttaatatttccttcacttttgaaggataatttccctgcatctagaattctaaattggtcacttttttcaacattttatatattttacttcactttctttattaatgtacggtttctgaagagaaatctgctgtatttcatcctgttctctatggttaggtgcttccctgccctggctctggctttttcaagattttctccctgtctttggtttttctacagtttgaatacaatatgcctaggtgttgtttgttttgtttttttgtaaggagtggcatgtatttatcttcttgatactccctgagcttcctggatctgtggtttggtgtctgtcattaattttgaaaagttctcagccattactacctcaaatatttcttcttcgcctttctttttttttctttctggtattccaattatgcatatgcttgttataccttttgctttttcattcttttgattctttacatttcagttggggacgtttctgttgacttatctttcagctcactgattatttccttggccgtgttgaatcaattgattagtcctcaaagacatttttcatttctgttacaccatttttacatttctagcatttgcttttgattctttcttaaaatttctatctttctgcttatattacccatcttttattgtatgttgtcttctttttccattagagccctcaaactctttttttttattatactttaagttttagggtacatgtgcacattgtgcaggttagttacatatgtatacatgtgccatgcttgtgcgctgcacccactaactcgtcatctagcattaggtatatctcccaatgctatccctcccccctccccccaccccacaacactccccagagtgtgatattccccttcctgtgtccatgtgatctcattgttcagttcccacctatgagtgagaatatgcggtgtttggttttttgttcttgcgatagtttactgagaatgatgatttccaatttcatccatgtccctacaaaggacatgaactcatcattttttatggctgcatagtattccgtggtgtatatgtgccacattttcttaatccagtctatcattgttggacatttgggttggttccaagtctttgctattgtgaataatgccgcaataaacatacgtgtgcatgtgtctttatagcagcatgatttatagtcatttgggcatatacccagtaatgggatagctgggtcaaatggtatttctagttctagatccctgaggaatcgccacactgacttccacaatggttgaactagtttacagtcccaccaacagtgtaaaagtcttcctatttctccacatcctctccagcacctgttgtttcctgactttttaatgattgccattctaactggtgtgagatggtatctcattgtggttttgatttgcatttctctgatggctagtgatgatgagcattttttcatgtgtctgttggctgcataaatgtcttcttttgagaagtgtctgttcatgtcctttgcccactttttgatggggttgtttgtttttttcttgtaaatttgtttgagttcattgtagattctggatattagccctttgtcagatgagtaggttgcgaaaattttctcccattttgtaggttgcctgttcactctgatggtagtttcttttgctgtgcagaagctctttagtttaattagatcccatttgtcaattttggcttttgttgccattgcttttggtgttttggacatgaagtccttgcccatgcctatgtcctgaatggtaatgcctaggttttcttctagggtttttatggttttaggtctaacgtttaaatctttaatccatcttgaattgatttttgtataaggtgtaaggaagggatccagtttcagctttctacatatggctagccagttttcccagcaccatttattaaatagggaatcctttccctgttgcttgtttttctcaggtttgtcaaagatcagatagttgtaggtatgcggcgttatttctgagggctctgttctgttccattgatctatatctctgttttggtaccagtaccatgctgttttggttactgtagccttgtagtatagtttgaagtcaggtagtgtgatgcctccagctttgttcttttggcttaggattgacttggcgatgtgggctcttttttggttccatatgaactttaaagtagttttttccaattctgtgaagaaagatattggtagcttgatggggatggcattgaatctgtaaattaccttgggcagtatggccattttcacgatattgattcttcctacccatgagcatggaatgttcttccgtttgtttgtatcctcttttatttcattgagcagtggtttgtagttctccttgaagaggtccttcacatcccttgtaagttgtattcctaggtattttattctctttgaagcaattgtgaatgggagttcactcatgatttggctctctgtttgtctgttgttggtgtataagaatgcttgtgatttttgtacattgattttgtatcctgagactttgctgaagttgcttatcagctgaaggagattttgggctgagacaatggggttttctagatatacaatcatgtcgtctgcaaacagggacaatttgacttcctcttttcctaattgaataccctttatttccttctcctgcctaattgccctggccagaacttccaacactatgttgaataggagcggtgagagagggcatccctgtcttgtgccagttttcaaagggaatgcttccagtttttgcccattcagtatgatattggctgtgggtttgtcatagatagctcttattattttgacatacgtcccatcaatacctaatttattgggagtttttagcatgaagagttgttgaattttgtcaaaggctttttctgcatctattgagataatcatgtggtttttgtctttgtagagccctcaaattcctaatcacaattgtttatctctttcctgacattccacatccaatccatcagcatgtcttattggctttactttcaaaataaattaaactcagccacttctcagcatttttaaaatcaccctaatacaaaccccctgctacctcatcaactgcaatggcttcctaacttattttgtaacttttgatctttgagttcttccaagagccaagagttcttccaaagctataaaccctatcattggcactcctctgctctatggaaagcagtggcttctcatctctttcagagtataatgcaaagctctcaccttagctggcatggccctgtgggattggcctcccttgtcttactttttccttgttcaggctgctgtgacctctctggtctttggctcttactagaaacctttgaacccgtttccttcccagtgtcagtatttgtgtgttgttcgttcacccttctcacttcattctggtttctacagcacagagaagtagtagtccctgatctaaacaccctctccacctgctttccactttgttttttcccctagcacttaccattatcagatatcatatatttatttgtttattgtctaacttcctcacaaaaatatgacgttgtgaggatagggatttggctttttgccccagagcagtgcctgactctcaataactttgttgtattaagtgaatgaataaaataaaattaaaattgattcaaagtgtatgagcatgtgtacattttacataagtgatacatgacattcttccattccttgggggctcttttaaccattctcaaccagttgtagtacctttaaaaaatcatgatgaagatgattttgagagctaattttggtaggagacagcagttttagcctgtccgctccatgtgcagaataatagcctattttattacatctgatattcaagcactagaatctatcaataggtaaataatttccaaaaataaaagcatcagtgggaaaacagggaaattatttttaaaaaagaatttctagaccaggatgtgtgcaatttgtaatctctaataagaaacgttatagctgataattccagcaattacagaatcatgatcatatccataatggatcagtagaggctctggcttatataatagcttgccctctcaggattctagagccccatatgtaaacacagaacacatttatattgattgacagtgcatgtaggtttctacagattgtgccagtcagtgttttctaaggcagttatgccatggtaattaaaattatgggctctgaaatcagcctgcctgggttcaaaccccagcttcatgtgtcagcttccttggctgtaataaggaatactaatagcacctgccttgtggctttgaaaattacatgatgtaactttgtcaagagcttagatgagcacttgggatatggcgagtgctcaataaatgttagtttaccatcatcatcatcattattattattactgattgcaagcaagacaaactggttctcacttcagcagaaaaagaaattactgaagtaattttggttagatcacagatttaacgtgaaggatgaataaccagacttggaaaacaggtggaaaccaagaggcagtcagcatggcatagcagccagcacttcaccagtgtggtgccttgggggcagcctggcaggagccactgccttcactcctggactgcagatctaccacaggacagcagactgaattgtcctatgtccagacttcacagtcacagggagcaggctgcatgcaggtggggcccaggtcacctaccttcaccctagagtctggagccacagaaaacagtaattgtccttgtagcttttgtgatggaaagcaagtcctgacacccaccaactcacatactagggaattcaccaaatgtaggacggcagctaagatgctgggaaaccaagaattaacaaatgagtattacaccaattagttaattcattacagatttcaatattttccaaaaaacatcctacaaagaacagctcactttaatatactccaacaaatgatgaaatctctccttggtcatcagcttttctaaatttctgtaactttaggtgattctgaatttcttagtgattctgaacttctagaagattctgaaacagaacagtcttactttgggatgtattcaaatcctagagatcagtcacatcaatctgtgccctttttcattatgtaacatgaaacaggaggacctttccaacttgccttgggaacctgctcctacaacagggtatattatcacatttaataaagaaagagtaatatttgcattgtgacccttcatctgaggtcatcgggactgtgctgtcctcccaagctccactgtaaagggatagacaacaaccttgtctcccagtcattgtaatctgtatcagagagcatcattagatgaatgaagatggaaatgttctcacggtcagcaggtggggaaggcaagacttgctgattggaagcaatgaaccatagttcattctaaggcttggggagagcaactttgaggaaatgaggcccctaaacttgccatgtaggagaagttggggggtggtaaattgggcaccctttatctactaaacgtaatctttacttccccaccctctaatttttctcagttgggcttgaaattgtttttgcttgttacactttatgggaaaagaaagggaaatcctaataaggtccatgccagcaaaactctagaagaagaaactaagaatttcaaattgacagtttgttaatgagaaaagacaaggttaaaggattttgttaaacagatgaccaaaataattattggaaacttctgcttctggccaaggtggaataataagggctacatttaccttcccaccagaaaatataataacaaacaaaaactggacaaaacactggacatgacactgttgtctttaaaccttggacatcaatcagtgcaggatgttattttgtaagaaagggaaaaaaattggggtgagccttctgattgtttccagactggagagaagtttcaggccacagcaagtggggaggaacctaggtgtaagtatatgtataaggtagcacatcatagtggccaaatgaatggcacaggaaagaaaaactacaagaacagaggaggtagggccacaaaactagagtggggtccaagattcactatggataaaatggggtgttaatttggttttcaaggccaatacaagaggaggcatagaaaaagaacaaggtggtgttgggaagtagtataaaaaggggcacaggcttatccttgttttataaaaaacaaaggtttttggaagggatttgtagagataagtttgaaaagtagtttgagactatgtgtggaaattcatgaatcttagagtttgattttattcaggagatcagtagcttttaaaatgtaaaataaaaccagtaaactctatctaaaataaattcttcccctaatcccaatataaaaaatacatataaaagcgtagctgctctagacaaaatggcgggtatgagatgaccagaaacctcaacagcactacctctggtagccccatagaactgccaagagttttcagagtatagttaattcctgctgacggctaaggcagtcattgagtgattggaaagaagacggaagatagacaagatcagttaattgggttggagggaagactgaagataggcaaggtgacaaattaggaactgttgcaatgatctaggcaagaaggaacctatgaactaggagggaggcttaaagacagcaaggagggaactataggcagggacatgtgaggaaatgcttagtagttaaggtgagtttgtaggtatgaaaggagagaaggaaagaacattaagtagcattaagtgaaccagataatttatagctccttgacctgaaacatttagaggctgtgataacactaataataataatctataattacataaattacgtagtgtaatgatatatcatgatataatcatcttaccaatgctttacagtcaatgacattgtggtacagagactttggaggcagatagacctcgattgtaacctctgtgctgcccgtggtatgaccttgagcatggtagttaatctgaacttctttcttttctgttaaattggggacaatgacagtacttaaccttatagtacttgaagggagagtgttagaattgatactggggagtctctccacagaaagttgtattagttattgtctttatttcattcttaatgaattagcactcccgttttctttaacatgttgaatttaaaacctcttagtgtatttctttgtcttgccttttaataccccatgaattattgagaaacaaaagaaagtgattatgcaaatgtttgaaatatctaataatacatgaacgtagtcatgggaaactggagaaataactttactgatattatactagttttttttctggaagcatagcatattaagaaaactcatttcaatgaaagaaaatttaaaaattagagtgcattagaagcataatccaatgaattctattcctaatgaatactcaggcagtatgttaactttttctgagatacaatagccaagccaaagaatttaaagaatgaaaaaaacagatgattaaacaaactgtgaagtaattagaggtagtctttgaaaatgcctcattaggcatttgactcattaggacagatccttttattttagggccaggacataattatttaagcagttgatgtgtctttagctcctttcaccttgccacaagttgtcgcctgtactgcctttccacctagcttccaagtccaggccgactttgaagagattccttagggctcacctcccctggagagtgccctctgtaccatctctctccctttcctcctcattcctattgcctgagtttattgttttaataaattcccataagttaacacctcctagggtggattagaatcattcaaatccacattgattgttactaagtagaaattttatactgagcctttctaaatccttacaacaacgtgacgaggatattatagttgctttaacccaaggagatgaaattcaaactggtggcattgcacacttacagtgggcttgcaggatgaaagagagcttggtatctcgatcccttatacaaaacaggtgggtcttgttagaaaaattcttcaataattgttaaggttaaaattttgaaaagtggttcaaagaaatttgctttgatgcaaatattgtctagtcagttacataacttgagctataatgacagtgtacactagctatccagggcacgacatctctattgtgctgttgaatatactgctcaaccattctggaaaatggcatgttcatgtatgaatgacaatgtatcttgtgtgtatggcattccaagccaacatgttggtccctgcaagtaaacttcttgactgtcaagaggctgcctgtttaatatttgcatgatctaaactaattgtttcctttgtttttttcctctgctttatgagctggtagtttgaccttttggcttttcccctgagagttaacaaaagttagacagttggggggtgaacttaagtaaaatccatatcactctatgttgctgctctactaacaattcaagaaaatgtcttggtagaaagcaaggaatgagttttaaattttctctttgaatttcaattatccatgccactcctgtggtccaccattctatataattaagaataagctgtatgttccatagtgacacaggctgttatttctgatttgcagttttcacttaacctagggtaaaattgaaatagaagtcgcatccttttttttttaccttcttccactcaattctagttagatatttttgaacttctataaaatgtctatgcaatattatcaccaataatgtgcaaaattactactcccatgtagaagaggatccattcttcattgaaccatacccttgggatcctatcacatgcagttggccatataatattttatattattgtttttttgttttgtttgttaagtttgtacctacataatggattaaattcaaaatctctgtttaactgaaacaaaatctgtttaactgaagcaaaaaaacaaaatctctgttttttgtttgtacaaaacaaaaaacaataatatttttgttttgtttgtatacttcatagggactttggaatttggaaaatatcgttcatttagggtatatatattagtccattttcatactgctataaagaaatacttgagactgggtaatttataaagaaaaataggcttaatgaactcacagttccacatggctggggaggcctcacagtcatggcagaaggtgaaggggaagcaaaggcatgtcttatatggcagcaggcaagagagtatatgcaagggaactgccctgtatgaaaccatcagatctcatgagacttatttactatcatgagaacagcacaggaaaaacctgcccccatgattcagttacctcccactgagtccctcccacatgtggggattatgggaactacaattcaagatgagatttggatggggacacagccaaaccatatcagtacattaaagaaaatatttgttagcgctaagtgaatctactttcacctacttgattatttgatgattttataaatagtcatctctttcctcatctttccagtcgtattttgttgttccaaagccaaaacctgtgtgtcttgtattcaacaacctgaatcatacagttgtgagacgtaaatgggtgtggtggttccacttacttctttacatagtactacaactaagccatctaagtagtctgctcctaaattcctccaagaagggaaatatcatgatttgatttaaatgtgacatcctttcttagagaagttttctttgtctccttcttccccagtcacttcctcccatccactgtgctttcggcagttcattcgttcattaattcattcaacgaatattgaataacttttgatcaatgtcttcctccctccaagctgaaaacttgatggagggtaacatgatctgtctttgtttaccactgcatcttccgtgaatatacattgtaagtattgaacggatttttactaaatgaacaaatactttgataaaatatttttgattactgccaatatcagtttctgaattgattctaaaattcttctgctggaaagtagattagcgttagtatgactgctgaagccttttaaagtgggtggtaatactacgtttcgttttgtttcattaacctaagtgctgttctttggaatctttttaaagtaagataaattacattcatgaaagaagcatattatttttaaagtactttattttggaaaggtaaaatgcttgtgtagttataatttggttactcttgatttcaccttaggaaaaacaatatcaccttctaaccatttcttttttagtcaaatctcttgcttctatttctctctgtagatccgctattaaagactgtaatcactgctgcatctttcctgtaaggcttgatcgcattgttaatttctttctaaacttgtagagtaggtgtataaatcgtatttgggtaatacactgactaatactgaagaaccaggcattttcttaccccagtcctcacacgaagtagggaaatacaagtcagaacttatcttctcaaaactctgacctcagaatttcctgagaaatctgaacctaaaaagattctttgcttttgacattttttctctggtgtccaccgcaaggctcttgctcttacattttttttttttttctaatgtttcaaatagaagatggtagagtcatatagtacaagctcagcatcggaggggctactggaggtcaactagtgcaaatgctttctgaataatggaatcctttgggaatacccccttgaaagtcttcatctagcctcttcttggaaaccctcagtgatacccctcatcgtctcctatgatggcagcttctatctttgtcgtcagctctgactattacaaactgcttccttacattgagctgtaactaactaaaaagtttccacaccctgcttctattttagcctttgggctcataaagaacaagttgaacccgtcttatgcagaacaacccatctacgggagatgctcaggtttcctccatgttttcctttctctaggctaacccttcgttgttcctcacttactcactatataacctgatttcatgtctccttacccttcttgttactctaacttgagtaggctagtttcaggatccagcaataagtgtgatacatcaggtatgctctgatgagttgagagtagagtggacatagcatctcccttaattcagatattgtgatctaattggcaaatctggcaataaaagttgaaatgcctgatccaggacaatggctggtcaggtgccattgttctcatcttttacttttaggtgtccctcaatttgttaagttagtacctacgtaatgtcctgaaacttgttaagtttgtacctacataatggattaaattcaaaatctctgtttaactgaaaacaaaagcaaacttcttttcagagccagaatctggaatcatacgtaacagagaatgatattgtacaagttgcttcatctctttaagtaacggtttctcaaacttacaagattattgtgagaactaaattagttctaaagtgcttccatgtaaagtgtatgtaaatgcttaaaatatatagtaagtgctgaatgcatattagaaataataataatctttattataatttttactatttcatgagaagtacttattttaatactgagcaaataggaagagttcatggcttctctatgtttttgaagtgtcatttaatatattatatatataaaacatatatatatttcagtcacacatttgtccaaataccttgacaaattaaaacaaaataagacaaaattctcacgctagttatttgttataaagtaatagaacaagtgatatgttataaagagcatttatttctcatgtctttgatattaaaaatagttgtattaactttttatcaaaacgattgcttccttcatataaatctaagaattatgctgtctgataaatattggagagattaacttctttgaaaatatagaagctttttgtctttttaaaatagttgtttttttgcagatgttaatacatttcagcagtacagtatggcctttttcaggttaaggtgctgagcccaaacctcaaagaatcactgcaaaaagattggatcccccctcttcaccccatttcgtaatttagttagtgagaaccacaactggctaaacctttgtggggggccgggcactgtggctcatgcctataatcccagcactttgggaggccgaggcaggcagatcacaaggtcaggaaatcgagaccatcctggctaacacggcgaaaccccgtctctactaaaaatacaaaaaattagccgggcatggtggcaggtgcctgtagtcccagctactcaggaggctgaggcaggagaatggcgtgaacctgggaggcggggcttgcagtgggccgagatcccgccactgcactccagcctgggtgacacagcgagactccatcttaaaaaaaaaacaaacaaaaacaaaaacaaaaaaaaaaccacctttggggggaaattatcaaataaaacaaactctttttagaattttacaacttttatgttaggaaaaaacaaatacatttgtgaaaagcttaaaatccagtaaatgacttgagggacttggggcaatcctagggtgatgaggagcaggttagtaacagtgaaggacttagcaccccagggggccagaggctgtaatataccttatgagcaagtcattcttatttagtcttgcccattaagaagtctacttggactaaatgcttttaaaaatgcccttttaatttactattaaaagaatattcctagcagaagtagtcttggatgctaaattctattttaagaataactaaaattagaattctgttctttttataacacctgttacacacacacccctacctagtgtgtcggaatcagtttgtatgggctcaccaaagcctactgttcaattttcaggagttttgtaagccatttgatgtcagacaagtggcctgaagtttgttatggtggtggtatttacaccatgaaaattggcatgttatggtggtagtatttacaccatgaaaactgctacaaatagaaatctttttcttcttctcttggagagccacttgttgaacacttaccagctcacctgtgcttgaaagtatttcttcaaataaaatgaaagctggttagctttgaaaattttttgtataaaagtttacacgggaaaaaaataaactaattttttttttccacctgtgttttcagggatacgaaaagaccgaagaggagggagaatgttgaaacacaagcgccagagagatgatggggagggcaggggtgaagtggggtctgctggagacatgagagctgccaacctttggccaagcccgctcatgatcaaacgctctaagaagaacagcctggccttgtccctgacggccgaccagatggtcagtgccttgttggatgctgagccccccatactctattccgagtatgatcctaccagacccttcagtgaagcttcgatgatgggcttactgaccaacctggcagacagggagctggttcacatgatcaactgggcgaagagggtgccaggtaagaatgcgaagcgcagcttttaagagtcaatagcttttcaagaacttgttgtgatgtcatgggagaaatagtgggggaaaaagaagcaataacatgttatgtaattggtttcaaggttacaggagatgtgttcattttcagtatcaatacactgtaattttccaggagattaggaaataatatttttaaatcagaatctagaagactgaaattcttaaattgacataatttatttttaacccatctcatttaccaaaaagatttagggtggacactacatggtaaaactatttaatagtgtatgttcacagtagcagaaacttttaacactaaatgaactacaaaagtttgtaatattaatgacctttgttgaaaacatctcaattattaatcaaacgattttatcttaaaaagatttttaagattcggtgtggtggctcgtgcctgtaatcctagcactttttggggctgaggtgggaggattgcttgagcccaggagcttgaggccatccggggcaacgtggcgaaaccctgtctctacaacaaatttttaaaaattagctggatgcagtggcacacacctgtggtcccagttatgggggaggccgaggtgagaggatggcttgagtccaggaggtcaaagctacagtgaaccatgtttgtgtggagtgccactgcactccagcccaggtgacagagcaagaccgtgtcataaaaaataaaccacacacaaaaagagaaagatctttatggattaaaaagataataataagtgtatttactgaatgccaattatttatccaacctggtgtatgcttagtattttaggagaaagagaaaggcaatggaaaaataaattaaggtatcatccctgaaagaaacttttagaaagacacagtggctgaagtgataccttgttccttcagttgattctctcagaactggtgttctggtaaaattggactgttactcctgttattcagggagaagaactcaagtttgtatggcaacaagactagaaaatgactttctccctgccccagtgtattcgttcaggagctaatgtagataaaccgaggcaagaagaagctaaattttttttctgggcttataggttaaatgagtgatagatttagttggaggttttctcatttggtttcttttaatagatgaaattaattgtttcctatgaagcatgaaatgttttatatgaaactaaaaaaatgtggagtttgtacttgcatttcaagggtcactgctctgttataggccaagtgaacttatgtctggccttagagaatcttacatgtatttgcatctatcagtatataaacatgtgggccgtagaataaggagccagcagtaccagaacccagccttgttagaggccaccattttggtggttgagtggttattagtttacatggaagcatggagaataataggcaaatgtaggttttcagtgtcagtcgaactggcaaacaaaaatttctggtcatcttcagaatgaaaagttttcttgagtacctacatattttagcattttcatatgaagcagatacattataagttaattgttggaatctaattgtaatatggctgtaagttttttctttatatttgttattgccttgttcttatattatagggaaagagaaacaaacaaacaagcaaagaaactaatggtcatatatttgagagccaactcttggttgctgttcagttttattttcctgtaaacatatattttcccttatgaaatcttgggaatattagctctggagcactgctgaactcaagtacagacattttcatgtgtatcagtagattcccatcatgacatttttataataatgttgaagagcattttaaacaactggaattaagctcaaatacattaccagtggttgaagaattcacatcaataatcttctgaatttaggaataaaatggagaagtcaaggaaagccaaatattatacacaggctagcaatagttaaaatacaattattaaagccagagctagacaaaattatggcaatgagatgtgtaacaaaaccactctgtaacttcatcatgttcgtttaaaagacctgaatgattccaaaatccttagaccaataaactatgtcttcttacttgataattaaaaaaaagaattataaaggcaaaaatgaaattatatgtatgtgtgtttgtgtgtgttccatgggaatacagctgttgtaaatcaaaggcctacttgcctgaccaagcagaataaaaatagtcattgattttaaagagactaaaagtgagggaagaaaaaagtcttctgcaaaagctctacagatggttgtcaaacttttcagaaaaatagacaaagcaacattttgaaaaggatttatatcttttatatattcaaataccatctgttatttaaaaaacatagcccacactgaatatctgatatagacaatataacgtttatgagataatagtttgagaatgacaataataatagtaagttttaaaagaggaaataagccgggcacagtggctcatgcctgtaatcccagcactttgggaggccgaggcgggtggatcacctgaggtcaggagttcaagaccagcctggccaacatgacaaaaccctgtctctacaaaacagtacaaaaattagccaggcttggtggcacacatccatagtcccaggtacttgggatgttgaggtgggagaattgcttgaacctgggaggcagagactgcagtgagccgagaccccacaactgcactccggcctgggcaacaatgagactctgtctctaaataaataaataaagaaggaaatagtaaacgtcattagtaagaagaatagcaaaatttcagttctagaaatacccagaattagctatatgatacaaaaaccctcatgaaacatttggataatcctcagaatacctatcaatataacaaaaactatgaattgacttcattttgaatgatgaatttttaacaaaaatagtcaatactttgggcttagtagctctagaagtgcttctttcttctttcttttaattaacagaatattgtcagaattttcaaatgttgatgattataagttgaattttccttttcattaacccctggggcttattttttgacttgatatgtttctctactcagaattaagatgtgaagagctttgggatagaatgcatcatacaagtgtgagagtcaagttccaatccataaagtacttctggtagacctggataaagatgaccttaagaaatgattttttttctctttgcagtttaaaaacaacagtagcaacaagaatgataaaacctatgaagccagctctgacaaaagatgtttttttataacacatactatgtatctactttttgatatttatctatcgagaagacttttctccttattgtttgctctgaaatttgtttatatttaataggaattttatagccttatccctgggtagaaattcagtttttttaaaagtagataattaaatcttaatttactattattttacacatggtgaaactagtcaataaatgtaatatcattgagctgaaggttaaaaaggaaaaaatatgactgcaagagtggttgtatttttgatttcagcatcacactcaattgcatcattgagtggttcattcttagtttcagtgttaatgaaatacatctgagtttttttccccagaagcttgaattgtgtcaccaaagtgtcattttgatttattgaaagttaagccctttccaaaattcaccataattttacatgtctcgaaagcaattttatacttcaagtctgtgctatagttctatatattttatgaagatttggatagatatctagccctgagttttttattgcctgttaaatacttataacccaaagtgtagcagcctcatgaactgctgctgggcacagatctgggagagtgcactcagagtgttggcccaggaagaggaaaagaggaaaaggggcagttcagtggcagcttggcttcctgtgaaacatgtcaccttaaccacttcctcattcttttagtggcaaactagacgaccttctccttcccctttcctgccgagtccccctctaatcaacactctagaaggcccctcttcctcctcagtcctgactccctgtcatttacttcaggttgcctccttgctcagttttggccccaggggtaggcaatctcctctttctggacatgtctcccaccagccccaagttcagatttcttggaagtttctgtgttgtctcgaggatgcatggttgtgtgagttattccagggctcaaggcctcttctgtgtctgtattccccaggaatccaggaattcacttctctgcctctcatcctcatcctcatcattaaaatgagcagatttgagctcaggaagtgcttgaataaatgaataaatgaacaaatgaaaggtgatttttgaaagtcttaattttaagaagtctctgagccctgttacagctcaattttcccataaactagaactgctctctaaggctgtgacatttctcctttttcctctcctcaaaatctacctgctgttctgatatctccctgacagccaccatagtgagattctatttccatttccaatctctcttttgtaagggacagagaaacagctagagaaatatggagccatgcgctctgaggactttagcaggcttcaactctatctgcaagtgagtttcacttagcgaatgaaattggaaacttaaagtgggtagggatgagggttcccggagaaggtgtaatacctcagtctgggaattgggagcatctacaaggaacacactcaattctgggaggttcctgtagatttcagagatttagcagggcttcccagcactctgcttcccaacctgtcattggaccagtaaaccctgctctcaaactgttgtggtgtccagcatgctttggcaaggtaatgaaagataacatgacatggacatatgggtgacatcctggagagatgacagaagtctctgtttaaggacaagatttgccatttagattttgcacccactgtataataagagccttaggattgggctggaatcgccctagcaggcatgatggcagcccctctggactggcaatatgcagcttttttgcaagtgttccatgtccaagtcaccccacccagctttctactgctcccgtggaagctctggtgaaacgcaaggaaagcagctgctgttgactggatttttctttcacatgaaactttgaagcctcatagatgcttattggcctggatgctattaaacctttaaaaatccctttctcatcttgagagtatttgagaaacatgtctggggcattttgcccaccctcctccaggttctgtgtcagtgagtgatatggtttgcctgtgtccccacccaaatttcatcttgaattcccatctgttgtaggagagacccatggcaggtagttgaatcatgggagcaggtctttcccatgttcctgtgatagtgagtaagtctcaagagatctgatggtgttaaaaaggggagtttttctgcacaagctcttcttctcttgtctgccaccatgtgagatgtgccttccaccttctgccatgattgtgaggcctccccagccacaatggaactgtaagtccattaagcctctttcttttgtaaattgcctactctgggatgtgtctttatgagcagtgtgaaaacagactaatacagtgagtctgggtcagtgtgtgtttatgttgaacgtagtggacttgtggtgtccccagggcaccctgtggggaatgttggcctgtggctttgctacttccagggggatttggcatggagaatgtgtgttttaagtaatagatagattatgattgaagtgtgttatgggctgagttgtctctcctcaaaaagacatgttaaagtcctaacccccagtatctcagaatctgaccttctttggaaatagtgcctttatataggtaatcaacttcaagtgaagtcattagcacaagccctaatccaataaggactggcattctaatgaaaggggaaatttagacatagaaacagacatgcacagaagaagatgatatgaagagacacaggaagaggacggtcatgtgactggagtgctgggtctgcaagctgagaaatgccaaggtttactggccaacatcggaaactagaaggggcaagagtggactctccccctcagagagagtatggccttgatttcagacttctagcctccagaactgtgaggcgtacatttctgttgtttttgaagccacctagtttttgatactttgtatgggagccctaggaattaatacaaagtgtattaaaaatagaattttcttctattgtatttttgaggcaaaagaaataaggagctattgatttaaggaggaaggtttggctcatctagtatagacttggctaatcatttactcttgtatatttctcttctgcctgcccaagtagttcactgaacaggcttagaagttgatttataattgtaagagtttacacatcagaagttaatttataattgttaacagtttcatgcatctacctcataaataccttgtaaaagattttacccttcagaataatgttttcctctggtactttagtagtttatcctttttttgcatctttgatgcatttgaattcatcctggtatgctgtgtgagctggggctccaatgtcgttttcctacagatgactccacagttgtttcggtttcattcgaacagcctcctacagaagtatttttcagacttcttttatacttgacttccaagtttactactggttaagagcttttaaagtagggggaaagatatgacccattggcctactcgtttgattattttttccaattctgaaatcaaaaattaaaaaatttattcaaagttatagtttcacttaatttatattaactgcatagatagtgtgattcatctgtcctgcttggacatatttagtaacttttaattaatcttagagataaaagatagaaatctatgagacttgagacattcaaataagaccagtactgataagaggtaatcaggtgaagtgccatttggttgtaataggacatcaaaattgttccccaagagtgaaggatgttccattctcacttttcccatctgtcctcccaaattctttcactcttcctgatgctttgaaccaacttgaaaagttagtccactcagaacctcagctgttaaacttttagcctctgcaaacaaactagccgttttcctctttgtccctttaccatcaagctcagttgcttctcctactcctctcccttctgccaggggctccacccttgttcctcattcaacagtggaatcatctgtgtgcctgtctcctctttactgtgtaccattgggtcctcttcttcaccatctctaaatttatgcttcttccctgttccactgtcaccagcttggtctacatcctactttgatcatttggatttaggtcccaccctaatcgagtatgacttcatcttaacttgattgcatctgcaaagacctgatttccaaatacgaccacaagtaaaggttcaggtggacatgaatattaggagagacagcacttcaattaacagtttggcattaggactttattatctagcttagtaattgttttaacagataaataatagtatcccctaaagtttaaaatgcagaaccagattatgcctcagggtgcctaacctgagaggaagagtctttcttcaacagactctgggaaagacctttgtaaaaaggctggtgaccattctatttgatttctactttccaatattaactgcttaagtcagacaatctccttggcccacgctttcccctgccattctccccttcacataatgtcttcattttatttttcccttgttttattccctgaactcccttctctctattcagattccctgcccattttttctcctaatgagacgcctgacttcctacctcctttttgaaacttcaaactgcttagcaaatacaattttgaattgagtttgctgtcacagaacaaaaactagtccttggtccagagtatcttgcaggactgaatcaactgtggtctaagacacaataataactcttaattattttcttgtttccttcatggtatatttgttgctggatgatgagtttatattatggttgaatttcctttttgaaatgaaaagatgaatagtctttattggctgggtatctatttttatccagaagactttgcaaatgagaaatatttctacaatctgagtttaatttgcttaagcaatgaacttgttctttaaaagtcgtatatgtgcaaaataaatttaaattaaataaatcatattttaatgtagtcagggtagctttcatttaaataaaacctatgacaaatatccacgtgaaggtatcactcctttaacaaaacaagtgttctccttttttattgaaatactagttttcacaaattgagattccttaatgtgatgaccgcttggactgactatagtatagctgcgttcttagaatggccctgaaaccacaaggcctctccaagatgcatgtggctgactttctgaggtgactgcattgaatctttctggcttagcttattctgcatccagatccctggaagctatttatccccaaacagtggtatatttagacccattgtgtgctaacctctctgtgccctaagtaccaacatagccaagccaaagttcgaactttgctgccttacaatggaggttacatcgtagtgatgaaagaggttaattttctttaggagttgaagaccagagaactgcaaaaaggggagaaaatcagtgtggcctctaatgagagctaagtgagtgaggcaatagaaaacagtgaggaccggccagtgcggtggctcatgcctgtaatcccaatactttggaaggctgaggtgggcggatcacgaggtcaagagatcaagatcatcctggccaacatggtgaaaccctgtctctactaaaaatacaaaaattagctgggtgtggtggtgggtacctgtagtcccagctactcgggaggctgagcggggagaatcgcttgaacccgggaggcagaggttgcagtgagtcgagattgcgccactgcactccagccggagtgagactccgtctaaaaaaaaaaaagaatacagtgaggaccttggagggaatcttacagtggagcagaattaaaagagaagaattcacctatttcctatataactccctctgtaaccgataactttctagagaaagctcactgaatatatttgaaatttgtttcataccacttttatgttattgccttctttcacaggaaccagagagctctaacctgtagatttgctttgttgtctttactttagactacagcctaaactgactgttgatttttggcacaattattacatctctcctttcaccccgcctctagccctttcttaattacccccattaggcatttttcttgctagcgtgaactaaatcccctgtctcaagcacgcgcctgtacattgaaatagaatgttaattcattgacgaaattaactgttcttgattgggaacccctagttccagggaatcttaaggtttcaattctgttgccttggttactaaactgttccatgcagtttgctcaactttgaatggatacttctcttaggaacattctcccttgtaagtaaattgcttgacgtgttaaaatctaagttctgttttacaattcttgagacaaattcaccatgatttagttttaaaaacaagtggccttgtccttttagtctaggatttatcacttagctgtatctagcaaagcccctcacacaatagtaggaaaaagcagaagtgtgattgctaaatgaaggggaaatgtaataaaatgatggaagtgcccttttttagggggaattaaagtttctctttgtagtgttacatgtattcattatgtgactttcataaatacaaaccccaataaaacggtgggcagttccgtctctggagatgttaagtgtctcttcatagaataacatggcacatcataacatttgattccttttacctggtcaagatgtttgcttatggcatttgaaatgcatattttcaaactaggtagatgaatggtttaaatataaaaattcattcaaggccctgagctatagaagaatatcttccaaaacatgcattcaagttctatctgtcagtgtttttctttttgcatcaataaggcagcaatggaatacaatcagatttattttttctttattgctgtctacaattcagagatataacctgaaaaatatgttgtctcttcccaagtagatcttgtaattctctgaactgtgatccagaccaatgccgcctttacattgggtctgtggaagtgggagggtccactgaacctggttatgagaggtttcaaattgaaaagatttacaagtatgtaaataaaatcaaatagtcaattagtatctaacatatacatgtcaaaacacatagccccaatctcataaaatcaaagagatctacctaaatagatttgtttgcctaacaaatagcaagaccactttgacagaatctttagcatgacagtgattgtcaaaatgggtaaatggttattattgcccagttaagtaatttctgatttgctttgccttgattactcttaataaactaaacttaacataccatagaagcaatattttttaaaaagagggtatattctagagctagatagggtgttgtgcagcaatgtgaatgtacttactaccattaaactgcatacataaaaagggttgaaatggtaaattttatgttatatacattttaccaaaataaagaaaagttataatactttccgtagcatatataaaaaagaaacagacatttcatagcaaaaataggataaaaatgatattaaattcataggggatttctcttatctaaaactttagatttgattcttagataagaatataaacacattgcaagaagataaatcaataagccaatgaagtaaggtggaataaataaatagaaataggtgatacttgcggctctgacagcatctgataataatagtacaaacagtttcatttcatttaacagttatttgatgaactcctgtgtgctaggaactgttatttaaaaaaagtaacttttattttaggttcaggggtacatgtgcaagtttgttatataggtaaactcatgactcggggcttggtacacagattattttgtcacccaggtactaagcatagtacccaacagtatttttttttccgaacctctcctcctctcaccctccctcacgtaggcccagtgtctgttgctcccctctttttgtccatgtgttctcattatttagctcctacttataagtgagaatatgcattatcaggttttctgcttctgtgtcagtttgctaaggataatggtctccaattccatccatgttcctgaaaaggacatgatctctttctttgtttttatggctgcagtgtattccatggtgtatatgtaccacattttcttcatccagtctaccattggtggacatttaggttgattccatgtctttactattgtgaatagtgctgtaatgaacatacgcgttcatgtgtctttatggtagaacgatatataatcctttgagtatatacccagtagtgggattccttggttgaatggtagttctgtttttagttcttttagttctgtgtgtgaaaacacaccagagaacaaaattgaccagatctctgccttcacagaacgttcattctactgtaccagttatttcatgaggaatatgaatactgttattactctctgcccatttcacacatgaaggagcagaaatggagcagagtttactaatttatctgttgcagatagtagctaattgtgtgccaggtgctgttccaagcattttacccctgttaactcagctgagtgcttttattttccccattgtatgcccaacttatggatgacagcactgaggtagagaaaggttaataacatagaatagtttagtattagggaaacaatttgaattctaggacacttttactgaaacttagcataggctaaagaagtgatcgtgcatgtttaaagagttgtatcattttatcattatttgactttcttttccaaaaaaaacaacccttctcctttctctctcttccatgtgacaaatacatgtctgtatacatacatatatatataaatataaatatatatataaatatatataaacataaatatatatatataaatatatatatatataatttttttttttgagatggagtctcactctgttgcccaggctggagtgcagtggcatgatctcggctcactgtaagctccgcctcctgggttcatgccattcttctgcctcagcctcccgagtagctgggactacaggtgcccgccaccacgcctggctaatttttttgtattttttagtagagatgggctttcactgtgttagccaggatggtctcgatctcctgacctcgtgatccgcccacctcggcctcccaaagtgctgggattacaggtgtgaaccaccacgtgcgacccacatgcctgtatattacagccgttgaaggacacaacttttgccattgggcgacccagtcccctagtaagtgttcaaaaatattcgctattatcattgttggtgatttcgaggatttggatataattaatttgagcctaattttttaagactattacataactatacaaaaaaatcatgagagagcctggaattttgcaaaactaggatagaaaccagtttctaaaaagcattttaaacattcagcttgtgtatttcttttcacttgtattttgtgatctgcctccatgctttcatgcctttctcttcaaacaatcttattaccactaaccaaaaacaattaaaatttgattgttttgttttgtttttacatgttgttacagttaagaaaaaaaaattctaggtattgacccctgccagttttcggagttaatattaactagtgatttggggctacatttaagtgctttaagctatcctacaagcttaaagtagtatacatgcaaatacttaaatgaattaggtacaagaatacagaggtaagaaatagaatctattgtagaataaatcctatttcaaatgtgactgttttaggatttgaatcaaccacatattacagaaaaccccaagataaagccttggcataaccaagacaaagtttatttttttctctcacataaaattagtccagacttattttaccagtggtatggcaactccacagtcaaagggacccaagctcatctgaccttcgattcccttatcctgggacaggcttacattctcaaggtcgactcctggcctaatggggctactggagcttcagccatcacactctgtgcttcctgttatatctactggtcagaacttcagatacatctgtctaaaaggaacgctgaaaatacaatctttaagctgtgcaattgtacctggaataaatgagttcttttaataaaaagagttgaatggatatttggtgggcaaatagcagtccatgctacaataataaacttcacaattttagaattagatatcttgtaatgaatattctgacgtggtgtcaacttataccatagatagattataactttgaaaaggaattagaacacaataataataaattcacactaaggctcttttggggaaaaaaaatctctaccatttattgagtgtttattatcttcacaacatccctatgagttagggactatttttgtggacattttacagataaagaaacagaggcattgagatgataactagcttgactaaggagtggcggagctctgggcagtgtggttcctgtgtgcccataaggccattgcacaatgctgcttcatcatgtaattcagaaagtattccaggatgtggcagttggtcatcatgaatgttcattgttatcttgtggctttgtgaaaaattctggtcattcaaacgatttgactgttgagattctgtgcacatgagattgtactgtgtacatgtttctaaaaatgtatgttatagatcaaaatgcacacactcatttacctctaagaacagttcttatattgaagggaaattatctgtacatgagagaacaacgtggttttgagtacaagtggtgaacagacattgaatagttgttttcagaaagcatcactcccctgtacctcagaacccagcctcagtgctggttgcgagccaacagctttgatgtcctgaagtttttgcatcacttctcttttgcccctctttgggattcaaagatgataagtttgaagtggagttctaccgcttccattggaagagaaaaagtttccgtgtgtgtgtgtgtgtgtgtgcgtgtgtgtgtttacggagaggagttctatgcatctgcagagggtgctgccatcaacaaggagaacagagtgggatgaagggtttgggaagccaggatgggcatctctgacgagctccagaactctccacctaagtgtgcaagtgtaaacactccctgatgtgtgaactggccatctcaagactaagtatttagcaggaaatgccccctattcaacccttgccttctcaggtgtagaggttgggttgtctcttccatctttgtttgaattatgtcattaatcaaccttagtgaaagatcacttagtcatttgtgacagcataagttcttaattgttaggaatcactggtgcggcacacatctttttctatccatgaacaacgtcaaatgcttattttctcatgagcttttattttttccttttaaaaaaagtttcttaggataaacacagcctttttccttgtctctcccttgccctctcatctttttctcaatctttatattcctatatgtcactgaagagtccccgtgccaacgctgtgcagtgggaggctcctacctccaccagcttttgaggaggttgtagtcctgcaaccttagaggttccacagccaagctgggggtctttctggagcatgggtggtgaatctgagatctatgcacccaggaagcctgacacattattgtggtgtctcaattcttttttttttaattagaaaaattgtatcaaattgcattgggtgagagcaaaaataaactgaagttggttgagctttggaagactacaagccactgtaatatttaagatttcttgacctccagaactaacatttgtcctgtcagagaaaataattactcctgttgagaatacatgcattaaagtaagatgttcactactctatatgatcaccaaacattaaataatatgttttacacatgtatgtactatgtgttcaagtgtttataaatccatggagccaatagaatgtaagttctatgagggcagaaattttaatccattttgttcctagaacagttcctgacacatactggtgttaggggtaggtcttcagattttatggatcaaatggaatctccacacttaaaaaaacttagagaaaaactgccttaatgtgcccatagtctggttggaaatggcagctccaggttcattgattgctttgttcattcggcacttttcactggacatgctatgagcccagcagtgttctgggtttttgggatacaccaagccctgcctccccggtgcttaacattctagtgggggagacagaaagaaagcaaacatggtggacaacttaattatctatttttgaaagttgacaggaactgtggacaaaagaaaacaagagctggagacagcagtgccagggcagggtgagggtcaagttagagtaagcctcattgagagatcttttgagcaacacctgaagggggaggtgagaaagttagccatgtggagggaacagcattccaggcaagtggcccaccaagtgcagagtcctgacagcaagagcagttctggaatattctagaaacaggaagaagaccaatgtgactagagcagagtgaggcaggagtgagagaaaatgtgatcaggaaagtaaggtcctgtggccactaagattttggcttttattctgaaggaaatgaggactcattgcaggactttgagagcatgatctgacttgtcacaagtgttctctttgtctactgggttgagaagacatccaaagggggccaaagattgaggcagggagagcagctaggacaggctctagcaatctaggtgataaatgaggaccgatggtggctctgacaagggtggtaatggagacatggtgaggagtgaccacatttcaaatatatcttgaggtagagctgacaggattttcccgatgggctgggcgtagtatgtgagagaaagaattcagttatggatgattattttgtcctgaacaatgataaaagttgagtcaacaactgatatggggaagtctacaggtggaacaagtttttgaggaggaaatcagttcagtgttggctatgttgaatttgagatgtttttagaccatctgagtggagaaatctggagtttaggagagaggctggacttgatatgatgttatgggtcctcagcatagagatgatgaatgggattagcaaagtagtgagcgtaaaaaggaaagggaaggagaccaaagattgagccttgggacagtcagaaagaagagagggaacccgcaaaggagattgaaatggaatccatctcactgtggcatcgtgaaagacaaatgaagatggtataagatgaaaaagtgatcagctgtatcaaatgctgctattgggtcaagtagggtgagaattgataattttccatcttgtcaagagcagccatgatagagggagggggtggagatatacttggaatgagttcatgaaaaaatgggagggaagggattagaagcagcaagtataagcagctctttcaaaggagggagatggggaatggctactgggatgccatcacatagataggaaggtggaaccctgtgcactggaggagggagtgtcctcacagaggaggacaggcaggaaggtagagtgggctgctttgggcacatgtggttctgtggatgttctcttttgacagcttcagttcttcagggaattgggagcaagttcatcagctgagagtgaacatggggcagacagtgtgagaggtcaaagcggcaagagtagttgtgccacagtcttttaggagagagggaaagtaaatggaatggggaaggaaagtaaatagcatggctgctgagctgcgttacaagcccacccggtgttgggttgtgaggtgtagttgtgggctcttcttcagtcggattgtcagcatgggcagctggcagagagttgaatctgacagggcagcagttctggaaaatgagtatgatgagtcaagaaagggaccaggaagtggaaactgtgtgtgaggcagtgatgctgatgaatgactgtggaaaacaatggaggtgaggagggagtggatgttgagtggctaggggacagtgaaaagggagtaggatccactagcttgctgcttgtctcttataattaggatcaagagcttctgccatcttctaggcattctgctgcttcaagggagtctctgagattgggttctgcatggatgtattgaaacatgcacctaggtgtgtttggagtcctgccagagacctgctttctctttattcttatcctgaggccctttaggaggctcagatggaataatttttatggtttcttaaaacccaagtgggttacctaagccatcctagttctgccccctgttccctgagaggaccacgggagcaccctgaaatgggttttccactctgccatcccccacttgcctgcttgggtgttgacctcagccatctacacatatcccggatgtagtgttgggcccctggttgatgtcattccttttcaaatgggatcttttactacagcaatccagcaacaaactaaatagcgatagagttttctttcccttacaaaccacaaccacaaccaagggaaaaaccaaaccaaaccaaccaaacaaacaaaacaaaagtatgtggcttcttaccacagccccctatctcgcccaagccttgtggctctttgatctctggtgttctgaaattgcgtaatcatgtgcttgctctttttcattcattgtgctgggcacacacttaatggaccctttcaagttggttttcttttatggggtaagggtaggcaggactattttttaagatttcttccactttgtcttccaattgttctaatgagttttttaaaattgtgcctgtcctgtttttaaattccaagagatattctttgtcctctaaatgtttcttataaatatatataaaatgaataatataagcatatagttttgcatagatttgagttcgctgttacagtgtccttttatttctctgaggatattcattataggttttttaaaaaacactttttctggtccccaaattatctcttctctctagacttcctccattcatgccttccttcccccctccctcccttcctttgctcttgctcttgattttggaggcttgtcataaatatttgaccatccattcattttttaaccataacgaactaaaaatgttaattggagccctgtgtgttccttgagcagaatgtttggattaatgagcttccgtgcaatgttttctctggaatggattaatttctccagatctataatttttcaatctctttccagggggtaaaagcctgattgtctgtttcatgaaagtaaaaatgtgggtaagagtgatcccagcattcagaatgcagacttagtagctgcttgttttcagtcctgggacttcacccaccctcaccacagttggtatcccaaagtgtgaaactccttagattatctttctcaagaaaatgaaactcagatattcgtgtcctttggccatttttgattagcttatttgttttcttccttttgaattgtttgaattccttatgtattttgaatattaaccccttattagatttatggtttgcaaatattttcccccactctgtgggttatcttttcactttgtcaattgtttactttgctgtgcggaaagctttttagtttcatgctatcaaactaattttgcttttgttgcctgtgcattcaaggttgtatccaaagaactcattgcccagatcaatgtcatggagcatttctcctatgttttcttctgatatttatatagtttcagtgcttttctttaaattttaatccattttgaatggatttttaatagggcataagtgtcacttccatttttttatatgtggatatccagttttcccaacaccatttattaaagaggctgtccgttccctattgtgtattcttggcacttttgttgtaaataagatgatcttacttgtgtgggtttatttctgggccttctaatctgtttcattaattcatgtgtctgtttttatgccagtatcacactgctttgattacaatagctttataatatatcttgaaatcagagagtttgatgcctctagctttgttctttttgctcaagattgttttggttaattggggtcttttgtggttccatacagatttaaagattattttttctatttctgtgaaaaatggcattggaaatttgataggaagtgcattgaatctgcagatcactttggatagcatagattttttttaacaataataatttttccactccatgaagaggtatacttttttcatttatttttgttttcttctatttcttttatctgtattctgtagtttttagtattcaggtgtttcacctccttggttgaatttaccccaagtattttgctgttgttgctattgtaaatggaattgttttcttaatttcctctttggataattctttattattatatagaaaagctacagatttttgcatgtttattttgtatgcttcaactttactgcatttgtttatcagtttttaacagttttttgataaaagttttggtgttttctgtatatatgatgatgtcatcagcaaacagagacaatttcatttccctattttccttcttttttttttttgagatggagtctcactctgtcacccaggttggagtgcagtggtgcgatctccgctcactgcaagctctgcctcctgggttcacaccattctcctacctcagcctcccgtgtagctgggactacaggtgcccgccaccacgcccagctaatttttttgtatttttagtacagacggaatttcactgtgttagccaggatggtctcgatctcctgacctcgtgatccacccgcctcagccttccaaagtgctgggattacaggcatgagccaccgcgcccggcccctattttcttaatcacgcgatatatacaggcttgttgaaaaacatgaaaatggtaaagaagtttatgtattaagaggcaaaagctatgatgttcaactcctctaaaaccacttcttagtaggtgaacattgttaaacagttttgtgaatctgcttccagattttttctaggcatgttcatacacatatacacacataatttatttttacccagttgcgatcatgtatcatctgatccaaaactcgctatttttcagttaatatgcagtgactgtctttccaaaccatagtatatatatatatctctaagaatttttcaaatctgctatagtttttaaacatatttattgttacatacatatgtgtataagttacttatttgcttatttctttgaatatctttgtctagctttggaatcacataaataatgagtacaaatggtaaacaaatttcatgtggaaggatatatagaaaaagtacaagtctctcttctcatccactctatctcattacctaaaaggttatccttagagctttatataatacacccctgaagtttagatcattttattgcctcccaattgttgagagtaaggaatttagtacatatacctttcctttcactttcctaccctctacctacttaatgagttcgattatagtttttcagttcacccactgttaaataatatacctatatttataatatacctatataatatacctataataaacctatatttttgacttatcaactttggacatatctattggtgacttgtgatgagagatgaaataatttgtacatttacccttcttttccattcttttcccctacccattctcccctttttggctaaatgattgcttttaggttgataaggtttataatagctactgttctgtggttaataaaatttgtttcatattttatgtgaaatttgattatacaactagcattcaaaacattattatgtaaatattagttactgtaatcacacagtgacgctcaaggaggtatttactaagcatacagatcattccttctggatccaactcagcagtcctttgctgtgccttacctcatctttcgtggattccttttcttttgattgcaatatatccttgagtaatttttcagaatcgatatgtactgtctgaactctcttatacccaaaaaatttgctttcacatttgctaatagtttgacagagtataaaattctgctttcaaattctttccccttcatggctttgaagatactgccccactatatattctaaaatccactgctgctaatgagaaattctggtgtcagtctgactcttatttctttcatatcacttggcattttcttccgagaaaatattacttatcttcagaatgatgaaccttctctatcatgtctctaggtgttagggcttctttcatttaatcctgtaggtcctcaataggctttttaattaaagtctcattttattcgggctctgtgaaattttttgttatgttttggcttctttttctcttttgttgtctctcttttctccttgaatgtctttctgatagatatagcattcccattatctatcatgtctttcagattatcctacatttttctctttgttttctttttctaccatgtttagaattctcttacacgtaagacatcacttactagatcttcagtcatatcctttttattattcagtctgtgcatttttaattttcaattttggcaaccacatttttaatttctaagaatctattttgctaatagtacttttgtcctgaaactttttatatcctgcaatatttagaaagagcacacccttatccacagctgattaggagtacactctgaatgcagggcacgatgggcgaacattttgttactggcctcctcaagcctcaatgcccagaagttattgcctccatcagaaacccttcttttgttctatctctcacttccaaatgaagttccagcttaatttttgctgtcactgtagtgggacaagcaaatccctatttcacgtgatcattgctcaaacctctattgacaatcctgctttgcattcccttatttagagtgggatggaaaataaaggctatgaagggggaagaatctgatcccaccattctcctttttcattgcagttttctcctgttttatggatgcaataagctgttgcaatctctcaggatggaaaagaacattttaaaactactctactgccagaatgatctcttttttttaattatactgtaagttctgggatacatgtgcagaacatgcaggtttgttacataggtatatacgtgccatggtggtttgctgcacccaccaacccatcatttacattaggtatttctcctaaatgctatccttcgcctagcccctcaccccttgacaggtcccagtgtgtgatgtttccctccctgtgtccatgtgttctcattattcaactcccccttatgagtgagaacatgtggtgtttggttttctcttcctgagttagtttgctgagaatgatggtttccaacttcatccatgtccctgcaaaggacatgagctcatccttttttatagctgcatagtattccattgtgtatatgtgccacattttctttatccagtctgtcattgatgggcatttgggttggttccaagtctttgctattgtgaatagtgccacaataaacatacgtgttcatgtgtctttatagtagaatgatttataatcctttgggtatatacccagtaatgggattgctgggtcaaatggtatttctggttctagatccttgaagaatcaccacgctgtcttccacaatggttgactaatttacactcccaccaacagtgtaaaggcattcctatttctccacatcctctccagcatctgttgtttcctgactttttaatgattgccattctaactggcataagatggtatgtcgttctggttttgatttgcatttctctaatgatcagggatgatcagctttttttcatatgtttgttggcctcacaaatgtcttcttttgagaagtgtctgttcatatccttcgcccactttttgatggggttgtttttttttcttgtaaatttgtttaagtaccaaaaacagatacatagactgatggaacagaacagaggcctcagaaataacaccacacacctacaaccatctgatctttgacaaaccggacaaaaacaagaaatggggaaaggattccctatttaataaatggtgttgggaaaactgactagccatatgcagaaaactgaaactggaccccttccttacaccttacacaaaaattaactcaagatggattaaagacttaaatgtaagacctaaaaccataaaaaccctagaagaaaacctaggcagtacaattcaggacacaggcatgggcaaatacttcatgactaaaataccaaaaagcaatggcaacaaaagtcaaaattgacaaatgggatctaattaaactaaagagcttttgcacagcaaaagaaaccatcatcagggtgaacaggcaacctacagaatgggagaaaatttttgcaatctatccgtctgacaaatggctaatatccagaatgatctctattttattttttatgacatattaatcatgtttgttctcttgtgtcctctctttctttctctcgattttccagtggtccacggtggtctatttgtagggttcatatttacaaatgggagtcaaggtgactccactacagttatgtgaaaaagtttccctgccatgcctctccctacactgggcgagctgatctggttccgggtcagtggatggagcatttcctctcgcaggcacaccttcaggctggtgggagcaacttgggccatggactggaaccatgtcaatggagaagacttcctctgtgccaggtcctggtcagagctgccgtcttgatttatttgtatccctctttccgtctgtggtaaagatctggaggttcttaagctctctctggcctcaaaacccacagcaggaaatttcctcactcagatcacccacatttttagcaagcagagcttcagttttgagtggagggcaggagtattgggcagtagggaaggacacagttctctacgccgttctgaatgcagtgcattaataaactctcttcacagttgctccagggtgctttgcattggtgaacttctggcttccaggaagaacctggttacctctgatgtgttgggttgttgttccatctactctaaattctgtgccaatccatcccatctgtttcctaccattggtttatttttaaaaaatattttatatttatgtagatttatgaacttgattattataccatcattagagtttgggtccagagtcaaacttctataaacctgtaatcaaaaattggcctttattttcatgtagaaggaagtagcagaccaaaatggagttctatattccatttttctaaatgagccattgagatgtagagcaagcaagtgcccttttgagggaatgtgtgtgtgtgtgtgcacacatgcaagggcattttcccatgtctcccatcctttaattattccagtagacagtgggccagcagcaggtggtggcataacttctccatttgcagtgctgtggctgtggtgggatctgaacaggaggcaaccttggcaacagtaggaatagaatgtggagtcagcaggaagcgcttttccctcccacttacctgtcttcttgtagcagacagcagtgcgggcagcttcggctgacttgcttagcctgtttccattgtgagcataaacaccttagacgttttttcatttcaggacactggagcttgatgaaattaaactacactcattgtctcaggcaaatctcctaatcctattctgtgcttttgttgttgttgttgttgttgttagtggtgtgtttctctctccacttcgctttccttttaaaacacaacaaatttttttttttaattttaaatgaacttattcattgcctccctatgtgtcccctcctttctagtgatattgccgctgttcattcccagctgttcttgattcttgtacaagactctttgctgggcttctgccttctagacgcttcaccttcccgttatttcttccctctgcccccggaaaggcccttaccatggctctgatgatgatgacagctgacccttttccaaggtggaatccacgtttgattctctgatcttgtactggcttagcacagtgctcggcattcagtaaataaggttaaggaaggccagtgatatacagtagtagaaaacagcagttaatgaaggcttgctttctgtcacaggttcctctcctccaggactgcagcatctctgtctttctgtcgtagcatacaagatagcatctctgtctttctattgcaacttccaggtgagaagccctcccacaagcatatacaaattttatggaaacagacaaaaatttgtagggaagcaaataccttcaaggttgagtctttctggtcttctagaaggtaagcttggtgatggggcagtcacagccctagtgcttatggaacttggccctttggggacagatctcagttaactaaagaaatgctatggcacagagtaccttgaatctcctctaatttatgctgtacagggaattattcacactttattgttaataacacattacatgggggaacaccagacagctgaccaggactcctgtgcttgaaagcttctgctcttcagcagggcagccagcctcttctcggtttagcacagagcttttattctcctcgctctctctaaactcctgttcaagacagtttccaattctgttgaattcactcatttacctcatctgtgcctttccccacctcattctctccccttcagagtgcccatttctgtgtttcaaatcccacaaggccaagcttagatgctattatgtctatgacattctccacctctatcccaataaaaacctttgatttcatcttgctgtttgtatctttactctggtatatttcacccataccagagttgtttgtggacatgcctgatttccttcaggctgtaggcatatttgattcatttttgtactccatgagtgcctaacatagcatcttatacaccatagataattaatagatgcctcttggctgcatttgtattaaatttttaccatgtacttgtcctagctagcagagacttggggggaaataatgatgactgatttttacttatttatttattttttattcccataggtttttgaggaacaggtggtgtttggttacatgaataagttctttagtggtgatttctgagattttggtgcatccatcacacgagcggtgtacactgtatctagtttgtaatttttttatccctcactcctttccctccctttctcccgagtccccaaagtccattgtatcattcttatgcctttacatacccatagcttagctcccacttatgagtgagaatatatgatgtatggtttttcattcccaagttacttcactttgaatagtggtctccaattccatccagaaccctcaaaaccatgcaaaaccatggaaacaaaacagcctgctcctgaatgatcattaagtcaacaatgaaatcaagagagaaatttaaaaattctttgagctgaatgataatagcgatacaacttaccaaaacctctgggatacagcaaaagcagtgtcaagaggaaagttcatagcattaaatacctacatcaaaaagtctgaaagagcacaaatagacaatctaaggtcacacctcagagaactagggaaacaagaacaaatcaaacccaaacccagcagaaggaaagaaataacgaagatcagagcagaactaaatgaaattgaaacaaacaacaacaataaaaaagataaatgaaacaaaaggctgtttttttgaaaagataaataaaatggatataacactagtgagattaaccaggaagagagaggatccaaataagctcaattagaaacgaaacagaagctattataatcaataccacagaaatacaaaagatattagaagctactatgaacatctttacacacataaactagaaaacttaaaggagatggataaattcctggaaatatacaaccctcctaggttaagccagaaagaattagaaactctaaacagaccaatagcaagcagcgagattgaaatgataataaaaaaaattgccaacaaaaaaagtccaggaccacacagattcacagctaaattgtatcagacattcaaagaaaaattgataccaatcctactgaaactattccacaagacagagaaagagggaatcctccctaaatcattttatgaagccagtatcaccctaataccaaaaccaggaaaggacataacaaaaaagaaaactacagcccaatatccctgataaatatagatgcaaaaatccttaacaaaatactagctaagtgaatccaacagcatatcaaaaagataatcaactatgatcaggtgggtttcataccagggatgcagggatggtttaacattcacaagtcaataaatgtgatacaccacatgaatagaattaaaaacaaaaatcacatgagcatctcaatagatgcagaaaaagcatttgacaaaacctagcatccaattatgacaatttttaaatatggggaatggtcttcatggaaaagtagatgttaatggcacctgtattagggttctctagagggacagaactaataggatagatgtatatataaaggggagtttattaagaagtattgactcacacgatcacaaggttgggttccacaataggccgtctgcaagctgaagagcaaggaagccagtccaagtcccaaaacctcaaaagcagggaagccaaaagtgcagccttcagtctgtggttgaaggtataagagtcccaaagctgaagaacttcacgtcagaaattcgagggcaggaagcatccagcatgggagaaagatgtaggccagaagactaaaccagtctagtctttccatgttcttctgcctgcttttattctggccatgctggcagctgattagatggtgcccacccagattgagggcgggtctgcctttcccagctcactgactcaaatgttaatctcctttggcaacatcctcacagatacacccaggagcaatactttgcatccttcaatccaatcaagttgacattacatattaatcatcacagcaaccaaaagattatctcatttaatccttacaatagctctgtgtagtgggtatatattttccttttgctgaagaggaagtaggcttagaggggttgagtaatttgcccagaatacctaggtagtagaagatagtagagccattatattctgtctgcattcaaaagagtgtgctgctttatttgttcctgaattgcacacaagctaaagaatacaactggatgttcagtctactcctattttgataacttggctaactttactgcagagtctgcagaggtgaccaattttactctgggagataccagggaatccgccatgtaattcctcaggctgagtgttttggaaacacaaagctgtcactgctattaagtgatgttttttcctgagagtctactatgctcccagtaccagcctccgcaggccctctgtctaccccttttctgtcctgatgtgttctagcaggcactgagaaagtcattgtagaagttaccatgactttccaaatgcttccagaagcagaacacaatttcacaggagggccaataagtatgaatgccaccttgatagaaagtgaagttttgcgtcctgttgaacactcagtaaatgcttcctgaatagatgcaggattggcaaaacatagctccccagctttcataattcagactcagaggcccttcgtgctcctgttattcttgttacttcatgtcaggtacctaaaagggttgtttttcagttttcgtcattgatttaaagcagaggttagtaaactttttctgtaaaggccaggtagttagtattttagcctttgtgagtatttggtctcacaaaagcagccatagatgatatgtaaatgaatgtgcatggctgtgatctgataaaactttatttaaaaatgaggggtcatctgggctgtggtttttcaacccctgatttaaaacaaaaacaaaatgtgctatgcctgttagatgctactacatttgattctgtgttttccatatttttctaaaatgtactgaacaggaaatgaacaaactgatgacacaatgatctaatttaatcattgagataagagtggcgccaactcttattgagtatttgttatgtgtcaggcacttggctaagcactttacatgttttctatgatttataaagcaaatattgttattatcttcatttttttgctgagggaaggaataaagtcacagccagcttacagaggctgccggaggtcacacatcaccagtacactgaaacacgtggtctgattacaggatccatgatctcctgtacagatcatagtgatattgacctgagaggaaagagcctaggacttacaatcagaaatctgggttcacatttcaactccgttccatgccaaattacattaaaactgggcctcacctttcccacctgtgaaagaggaataatactaggacttgccctcccaaccttagagattgctgtgaggataaaagcctatatgaatgtgctttataaactataaacaccatacaaatgtttgttataagtctgccatttgaatacatcttagtctttttttcctatgtgaaataaaacattttaagacaagcaatgaaattcttgaaactataacaggtttttaagggtgttgatccccaaagccgtcttcactattttgctccctctctgactcgctctgtctctgcctagcagcgctagtcttttctacgtgtttgatctgttgttcctgtgtttaggcccatccctactacacagcggaagtcagctattttttctctttcctttgctctgctgagcaagattaaactcttttcacctggacttttcctagattactcaggctgggtggaaatggggtagctgtgaggctgggatgttactgtacaattcaaatttatgatctgaacttaactagatcttgctgaagattgacctggctagcacagttttgaggcacctatctttcagtcccttctgtcctcttggcctggccactggccacatgttagtagcttacttctaaggatggaatgccatgcatctcctacaaggttgtctctatgcttcacacaaagtaaaagaatggaggcaactttgaatgctgctcattttcactcaggcaatccctttacaatattgtgcttagtaaactccccccactctttttttcccttagcttgttttttttttctaataaaagtctatatcaatttgatgtattagttagggttctctggagaaacagaaccagtaggatcaattgattggtcaatcaatcaatcaagacaaaaagagattcatctggaaggagttgattcatgccattgcggtcattggctagtctgaaatctgtaaggcaggctggctgactggaagctcaggcgggatttctctgctgcagtctcaaggcagaattccgtcctcttggggaaacctcagtctttgctcttaaagctttcaattgattggatgaggcctacacacattatggagaataatctgttttacttaaagtctactgattgtaaacattaattatatttaaaaagtactttcacagcaacatttagactagtgtttgaccaacaactgggcaccacggtcaagccaagttggcatatagaattagccagcaaacttggtattcacaatctgtcattatagtcttgtctataaacctaaggtttagagaaacgctggtcattctgaacaattccctgtgaatgcagagatcaaggagcctccccttaactgggtaggcagtgtgaaatacctgcagtgtgcttgaccttactgttcacccactggcagctgttcctacagcttggcttcagatatataatattacattggctaacttcaaagagcattgttttccaaggatagagatggtgatggtgtatattacttttaccagccccagacctgtaagaggttctcatctcttttgtttaagattttgttgtttttttttaatgctcaataaaagaagctttattctttcattaaaaaacaaatctcagaagaacagggaagaagagggtagcctatgaaagtgtgattgttatttgataccatcgtgacttagcttgttttcacctaagactctgagattctattctgtttatgtgagatttgggctgagttcaactactatccatattaactgaatcataaaacaattaatccatcatctggttacattttggtggggagggagcatttaacacaacactaagccacatatttcactattttttttttttgcagcaaattgacttaactgcttgctttcacaccatgcctataaaacctttttggttttagaggttctatgtgtctggaaagtacagtgaagtatctcatcagaatagtattaatatttcttatgacatttcatatgtcctgatatgggttaatggagaaatatcataagagtagtaattctcttgctgttattatttgtcctatttagacaaacagaacatagaattaataagaattcaaaaactttaatcactgatagagattaaatgatgtttatattagtcatcatcacctaatatcttaaatatttaaccttttatgcagtgtttgcctctctacttgggtatgcccttaacagtaaaaagtgttgataatgctctcccttttggcactcacagaattgctatacatatatatgtataaaatatatgtaaatataaaaatacatagttaaaaaaataaatctaccactaaatatagtaagggagttttaaactgaggtttttgaagtctttaagaatttatttagagacttcttttgttggaagtatggtggctagatgccatgaaaaacccactgaaaacaagtgtaagtgctaggtaatatgttgaaacatatcttttgaaatgtattactgagctggcaagaaagtatgccattgtagagagtgaaaataagtgaaggcagaatcctgggaggtaagccagcctgaagatattgatgacactggatggccttaagtttccattttgactggcatgtaatccagccaaagattcccacagaaatccgaggttccaaatggtaaatccgtggtgacattggggtgaccgagaaatgaactctgtgtagaaaggaatggtaacaacacttgtctcgtacaactttggctctgggtaggggaaaggaaaacagcttcctagagaaatgttaaccacaagctagccctcatgagagatttcagctaggatggatgctatctgtgtagtgcaaaaaaaaaaaaaaaaaaatccatagccagattttgtgctttaatgtggacctaggtcaatagtgactgcaaagccagaagcagtggctcacccctgtaatcccagcactttgggaggccgaaggaggtggatcgcttgaggtcaggagttcgagaccagcctggccaacatggtgaaaccctatatctactaaaaatacaaaaatgagcctagagtggtggtgggtgcctgtattcccagctacttgggaggctgaggcacaagaattgcttgaacccaggaggcggaggttgcagtgagccaaaatcgcaccactgcattctagcctgggcaacagagtgagacaccatctcaaaaataataataataaaaaaaagtgactgcaggggactgggaagaggaaacacaaatctttactggggaatggaatttcaagtgtatgcaccaacccttagaaatcacaaaacatctgacccttctgaaaataaccaccatgagtgagacagcaggaaaaaaaaaaagaaaaaaaaaaaaaaacaaggaaagagagggacaatagaatcagactcatacctacaaaacttaaaaattaaataaaatgaatcagactcagaggcttcagagtttgatttaaatacattatacaaaagttctgtgtgaaatatgtttaagatgtagaagggtgcttgaaatgcacaaagtcaacagctgaaaaattgaccaagcagatatgaaaataaaatccaatagagggcatctggaaataaaaaagtataataattatagtgaaaaaagttattagatgggttaattagtagaatggatatagcagaagaaagatttagtcaactgaaaaatatatccaaagaataggtccagaattaagcttagggagataaagagatggtcaatacgaacattaggagacatggagaacagtgtacgaaggtgtaataaattctaactggagttaaagaggagatagtaaagaggaagaaaaaacacaaaactcaaaaaatgtagtggctgagaatcttccagaagtattgaaagacaccaatccacagattcagaaacctacaatttgcaagaaaaagtaaaaagaatttcacaccaagatccatcttcatggactggcagagcataagagatgaagagcttatcttgaaaatgcagccagagagaaaaggtctatcgcagttaaaggaagaggcaagcagatgactgagttctcaatgccaactgaaaatgagaagccagtggcacaccttcaatatgttgggagaatataattttcaacttaaaatagtgtacattgtaaaattacatttcaaaaaaagagggtagtataatgacattatcaaataaaaaccattccttataacaaatatcactaaagaaactgttggaggatgtagtttaggtttctagaaaggatgtctgatatgcaagaaagaatggtaagtcaaatattgagaaatatgtgaggaaatagaaacaagaataactaatgaatcaatgatactgtctaatttgaaggttaaatgattaggtagaactaaaatatgaaacaataatagtatgtaagtcgggaggaggaggatgaagcttgaagtgctctatgcatcttgcatctctggtgtctttcttgtgtccaaactttttcttctttcaaggacaccagttagactagattagggtccacctaatgacctcattttaacttatttgcctctttaaaggttctatctccaaatacggtcccattttgaggcactaggggttagggtttcaacgtataaattttggggggacacattccagccgatagcaattataaatacaacttttatagtaaaagcccatcttctagaacaggtagagaacaaggttacttattttttttaagaacaaaattggtttaaattatcctaaaatgattttaggagaaaatggacattaaatatacaacatttcctcctttattattttattgatgacttgatatgttttttaaaactcagtaaaataaatgattagtctcataatcataagagagttatgcccttattttaatgccataaaactgtgacttctgaagaaatacaatcatataaaatcatattttaatttacttttgagaatgtacagtaactcaggaaggcagagtgtggaacctgctttaatgaatagataagaatgactagcaattaaaaattaattatctataattcttctgaagttcttgaaaataatctcttctaacctgggtaaatattcctccttttcagaaatgtttgcaatgttgcttttttttaaattaatctctttttcttagataatggaacataaatcttaggcacatttgctttgtaaataccaaattgcacacagattaaaatttaatgagcttttactgctgtaatctcaacaagcagagtctttgctgttggtttttcaataagaaatactttattttgttatacagtggtcattaagaaccttaaagataatcaggacagattttccaaattgcataatgctattgcctagctatttgcatgtattttttttaaatgacaagacatttcgttaaatatttacttgcctgacgttgaaagatttagacaaacaatgtacttctagttgtcactttttcaaaaagattcttagggaaaagttagccgttttgttggttggtaagtgatgggttttcttggaacgtgttgcttgctaattttaccagagaagaaaataaattcaaatggtaagctacattccaatttgtattcttcttctaaagtcctccctgtttgcattctcggattttgacactcctacacaccagttaaagcacttgttagagtgtccaaaaaattgttgcaattaatttcccagtctcttctctctttgatgtgtcactataatgctttgagtaattttcagtgtctggcatctgttcaaggacaatttctggattttaggagggggagaagcaataaaggaaacaacatatgttttttcctaaataggaggcattttttgtttgtttgtttgaacaaaaatcgaaaactttcttttctatataggtgacaaaaagatacacgactcattggttgttaactaccattgcattcttttctctttggagtagcccttaaggaccagattagaccagccatctgcatcatgtagcatgtctgggttacctttcccaaaagaagttcagatagatgaactttgcaaaccagagccatctgaagtttgttttttctttttgagacagagtctcattctgttgcccaggctggagtgctgtggtgcaatctcagctcaatgcaacctccgcctcccgggttcaagcgattctcctgcctcaacctcccaagcagctgggactacaggcacgtgccaccacgtccagctaatttttgtatttttagtagagacagggtttcagcatattggccaggctggtctcaaactcctgaccttgtggtccacccgttttggcctctcaaagtgctgggattataggcataagccaccacgcccagtccatctgaagttttaaaatggctgcaggtatcttagtaggagactaattttattttccaatgattagaaaaaaatgaccagaccaagaactctagggttatgtttcatctcatatcctgtgcaggatgttctgagaagtttctatttgtatctgtggagtggttctagtcttgttcatcttgcattttaaggtttggaggtattttatcttgccttgcttctttaccaccttgctttaatttccccctatattgccatttctaaagtaatgactcattttcaagggtgggtctgaaaggaaagaaataataaaaccagagatctggagcagtttctcgttcatggtcttattcactttttaataagagcatctagaacagtgagtggtgccccagcagatatctggaaatttttgtggaattgaattgaatttgttcttagaataaatgacaataaagaaaatagtattatggaaactttcgacccaagggaaatatcaaggctaaagttgctatattctttttcttctgatggatgctgagtttttctccttaaaaaacaaatccacatttaaacataaggcattgtttgatggcctatcacattcagtagaatggatttgagaaatacgtgtaggatgcctattaaaaactctgttttgaaattaaacctaagactataagattgtctgtttaaaaaaattattgctgctgtaatttgagcaaatctgaactatattgaactttagaaattcaaatgtatgcaatcttgtaatataacttactccatcggtagacatagttctttgtcccacctggcttccagcagtttgtctgtctgtcattaggctaaactcttcatgttcctaaacatattttcctcaaaaggggacatatttcttgggtcagatgtaaacatcaagctaaggagttctgctgtgcgtctagacaaataaggttcattttcatcctctacatagtgttaaacttgaatttaagatcacacagattcctttacacgttaccaatgtaatgatatagacaatctcactttattcattcactctgtttaattcattcaataaaaacgtatacattggctgcctactgtgtgccagttggtgaagatataaagatgattaaggcaagggtctgtgctgacatgcctaatgggcaggctgacacacctaaacgccagggaaaaagagggatgagacctgggcctctgaagccctggccacctggctcgaagctcactttaatgtgcttctgggtgtattccatgactttttaaaggcgcttatgtttcctttctggtaaagcatgtttaacatgcaaaatgcttatttcattgagtagcttttaaaaagtgttcatagaatgtctagaacagtgcttgtctaatagaagtataattcaggtcacgtaggtaatattaaattttctagtagccacattaaaaagtaaaaagcaacaggcaaagttaatatttttttttttcctgagatggagtcttgctttgtcacccaggctggaatgcagtggtgtgatctcggctcactgcaagctccgcctcccgggttcaagccagtctcctgcctcagcctcctgagtagctgggactataggcgcccgccaccacacctggctaattttttgtatttttagtagagacggggtttcaccgtgttatccaggatggtcgttaattttaataatatattcattaattttaataatatattcatttagtcctatataaaaaaattagcatttcaacatgtaatcaatagaatatattattagtcaactattttgcattctttgttttgtaccatctttgaatttcaatttgtattttatacttacagtgcatctcaattttaatgctaaatgtcatcggagatattcgatctctgtttagctttaatatatttttgggttgaaaaagtaaattcacataaccaagttcttccaaatatacttgaaagtgtttctgataactgagttatcaacttaaaaatgtaagttaatgacaataaatgaaagaaaaattctgttccttagctgcactgaccacattttagtgttcaatagtcgcaggtggccagtggctatcatattggatagtacagctttagaatgacagttcagtgcaacaagtgctataatagactcatgaactggaagctccgggaagttaagaatgggatcaatgaagtgggtcttgaaaaaccaataaaaattcaccacgtagagaggaggagggcgactactccaattcaatcttttgaaagcatgtgaaggagcaacagtagacttctttaattatttaatagtaatttattgaacatgaattatgggaggtgcatggtgtgggtgctggtgagacatagttcctgagctcaagtagcttggtgtctaaatattcatgggcccatttttcagaaaggatggatatgtgtgtgatcctgggtgtgccaaatgctgtggcttcctgaagcttagatttccagcttgtcaccttcaaggttaccttgtgaataggacttttttgagctgtaagtaaatttactttgcctatttatttccaatggaaaaaaagcttttttaaaaaataaatctcatcttattgcctatgattggccaagacaacatggcccatacagaaggtttttgatggcttctgaggtctgttatcatttgcttattggcatttcagctgtcaaccagggttctgtcaaattccattcctgcctttagctcttttacttgaatacctggggcaatggcagaagtggttgctatttgtcacctttccaggatgttagtcgtgtccttgagacaaatagaaaatttaaagtcagatgacttgattcctctgccagttaagacccttagagagtcctcagcatgttgcttatttttaaatttcaagtccctggtaaggatcaagtaaactccccaatttgcagatttctatccagttgactatggattttgcctgttgctttgtttccaccaactctccctgaagatgaggcgcacagacagacaactcacaggcaagaacagcctggtccatcttgaaagattctcaagactattctccacaagataattgtctacttttaaaaatattcagtaaagggaatttttgctgttatccttggttgtgtttttagtatctcatcatccttctagttgtaggaggcttttcctaacatctaacccatatgtctgttgtctcatcaggtgtttctattaaggctacttccccatcaatcttaattttttttttaatcttctgagatgtataggttaagttgaaatcagagactttcataaaatggtaagatggccatttaaatgcaactatgaggaaataatgtaagcaggattccattggagaaccaaacactagcaacaactaacttggtaatcaatgttgggacttgaagttaggctaaaatcaatagtaatggcactcgtatgtacaaatgcagaactttttacacacaatgatttttccctctgttattatacactagctgtgtctgagtagacagtccagctccactacctgcagtccaccctgggctgtgtaatctgagcactgatgggctgttatttgtacgtattacttctatgacactgttttttcatctgtgttagaaatgtctttctttcttgaataagctgcttcaatttcttatagacagattctgcttttatgacccttgtttctacaaagtaatctctactcatgctgaaatctcagacaattttaacaaatatttagagtacttaatttttctttgaattctaaatattatccttctttagttcaccatagttggatattttgagataactgtggaggaaacagcactgatcctggggccatgaaacctgatttcaagatctagtcccttctttaattttgcacaactaatttaatcacattcatccttaatttcatcatcattaaaatagcagagaataattcccgtttcatggagttgatatgcaatgaaatagcatatcaatgtatgtatgaatgtccccccacatagagtactacacaaatgaaacgtgtcactcagcataacgttatgtgctccttcctgcaactggattgcactccagtgggatttcatgctggtgagatggctgtgctgctggacttcatgggacaccaatctttgaaaataagcctgatctggctgggcgtggtggcttatgcctgtaatcccagcactgtgggaggctgagacgggcggatcacctgaagtcaggagtttgagaccagcctggccaacatggtgaaatcctatctctactaaaaatacaaaaaaattagctgggcatggtggcatgtgcctgtaatcccagctacttgggaggctgaggcaggagaatcacttgaacccaggagatgaagactgtagtgagccgagattgcgccactgcactctagctggggcaacagagtgagactctgtctcaaaaaaaaaaaaaaaaaaaatagcctctaacaaaaaaaaaaaagaaaaagaaaataaacctgatctatagatgaggccagtggatcttgtgaagagttgaaaggtcaggtatcagtcttataccatgtcggatggggcaatcgtcataactttttaaaaaattatttatttattttgagacagtgtctcacgctgtcccccaggctggagtgcagtggcatgttttcggctcactgcaacctccgcctcctgcgttcaagcgattctcatgcctcggcctccctagtaactggattacaggtgtgtgccaccatccctggctaattttttgtatttttagtatagacagggtttcaccatgttggcccaggctggtctcgaactcctgacctcaggtgatccacctgcctcagcctcccaaagtgctgggattacaggtgtgagccaccgtgcctgccccaattgttacagctttttaagtggattatatgcctgcttcaggcattagacataataagttaatctgttgataagtttcttcatttcttaattttcagttgtgttttgatgtgtgtggtctgggtgagcggctcagtgctgctgctgtggagaaggcatgatatggaagggatgtgactgtccttcttcatcttcataacggggccaggactggggtgaggtgtgtgagatgaatgaagcactggttttgatacaaaatttaagaaaaatcaaattcaagaggtaatattttaatacgatatttgtaaaaaatcaaaattagtgcaaaaatttgtgatgagcaaaatgttagataaaggcattgttgcttttctttttctgtgtattgtaacacaccatcacttagtggagaaacagctctcactttcctcctccccagatacaaccatttatgttgaattaaacttctagttctcctatacctgtgagcatcccccaggccccttggtatggagaaagcagtttatttgtcttagtaagattataaaagtggcaataaaatgtgaatgtaatgaacaaaatgcacattttgtggaccaactcgttgttttagatctatttttgaaaactcattaggtatgtgcatgaggcaaaataattcaagtgcagttggatattaaatgaaaaagtgtcaggtccccttttctgccatattctcttctgtgtcttcattagtggaaaccattttgaccagttcttataattctaatgatttgctgatggctctaattcttggtttatcaacttcaagcagaatgtcttgacatcttggtatgaaagttaaagaatatgaatcatttgttctctcccttctcctttcctctttctctgcctctcagtttttgttgtatgctcacggagtatgtgtgtgagcatgtgtgtgtgtgtgtgtgcacgcgagcacgtgtgtgtgtgtgcgcgcccatgggtccatttttgcatggcaggctttgttttagaaagattggttacaacagctgccccaccaatctcctctacagggaaggattcctactctgagaccttggtcttttccaggcagatcacttacatttcctcacagattatttctcatcctgcagcctgggtccaaatgggctttgctgtgaacagtgactctcaggcttctggtctctgctgtgcttgagtgtcgttgagatgctccatctcctcctactgcacccacccagcaatcatctctctttcaggaattcaccaaagtcttttttaaaattattcttttgttttgagacagagtcttgctctgttgcccaggctggagtacagtggcgcaatctccgctcgctgcaacctctgcctcctgggttcaagtgattctcctgcctcagcctcctgactggcagggactacaggcatgtgtcaccacacccagctaatttttgtatttttagtagagatggtgtttcaccatattggccaggctggtctcaaactcctgacctcaggtgatctgccggggtccattttacgtggcagactttattttagaaagataggttacgacagttgctccacccatcccccctgcagggaaggagtcctactctgagaccttggtcttttccaggcagatcacttacctttcctcacagattatttctcatcctgcagcctgggtccaaagtgctgggattacaagcgtaagccaccacatccggctcaccaaagtctttgggtggttgatgtcatatgcctccagttgatagcacttttaagaatttttcctttttgtatgctgttattatttttagaaggcttttggattattattgttaaagagtatgccatgtctatcttttaacttttaagcatctattgctttgttacttgtactttatatatatgtatatccttcccccaataagacaaagagtgcaaataatcacctcccttgcctgttgtttgggtttaattcaggagtcagtggaattaaaagcctaaactcagtatagttttaaagcagcagtccccaacccttttggcaccagggactggctttgtggaagacagtttttccatggaccagtgtgggggctggaaggtgattccaggatgattcaggtacattacattaattgtgcactttatttctattattattacattgcaatacataaggaagtaattatacaacttaccataacatagaatcaatgggagccttgagcttcttttcctgcaactagacggtcccatctgggggtgatgggagacagtgacagattatcaggcattagattatcataaggagtgcacaacctagatcccttgtgtgcacagttcacagtaggattcgtgctcctatgagaatctaatgctgccactgatctgacaggaggtggagctcaggcagtaatgcgagcaatgggagtggctgtaaatacagatgaagcttcacttgcacgttcactgctcacctcctgttgggcggcccagttcctaaccagggttggggacccctgctttaaagaatatgtttgtggattcatagagggaaacaacacacactggggcctttcggagggtggagggtgggaggaggcagatgatcagaaaaaatattaataactaatgtgtactaggcttaatatctgggtgttgaaataatctatacaacaaacccccatgacacaagtttacctatgtgagaaacctgcacgtgtactccagagcttaaaataaatgttaaaaaattccctccaaaaaggatatatttgcatcggagttatatttgtatatgagtatatatttgtatatataaatatacttgtatatgaaaaaaatatcttttttctttcattttattttccaaacattaaagtcgggcacattggttaggaatttcaccaatactttttacaaaactgaggacttggatgataaaggcactttttaaaagattacacactggcatggggaataatacctttataaagatgatctatgtgttcctgaatatcccgatgcatctcctagctggatcttccgctccacaaaaattcataagatgagattcttgaattagaatgcatgccttaatgtattaagtctatgtagagagagttatttagtccatgtaaattaagtgggaatatttttatttgattactgttttatctggatcttgcccacttaaggccttcaaaaatgaaatttaaggcctgttaagcagacccaacatcaacagcatattctctctctcttgtaagtattgtctagttgataaaaaatttcaaaaacatgtcttaatcaaaaacaagatgatccagcacaggtttaataaatgttttgtgaatatggcacattcgtgtctcattactacagttttcctatgctgtctttctcaataattccccccaaaattgtagtgtttacattatggcatttatagttacctctgaacctaaaaaattaacttcaaaagtatttaaaaaaatcattatatttaaaaccatttcatgtttaaatggtttgtacagggcaatgaaaggaaatgtagtaataaacacagaatcagatttggtcactaatatttttctgcagttgaaatatatgtagactggcttagggtctaaatagcattgaatcctgttaccttccatctataatcaattaatgtattatgacattgttgtcctcagatcactgggatctcatggtaagtaagtaaagggattattctgtgcattttcccaatatctatattagttttaatatacctttatgttaatgtatgacactgacacttagtaattggattaacttcctatcagaatttgtttttcactcatactttgtatacatgtcttaagggtagggtagatgtacatttttttctgtgttagcctatctgtttctgtgacactacatgctttctgtcctccaatttgtgtttctttccgtgtacaaatatgcatcatctaccatctacatctacaaaacatgtaggcttccaatgttttcatgtaaatacatttcatgagtcctcagtagagtgttagatgagtggttaattagtaatgttaataaatgtaaattacaataaaaacatttataatgttaataaatataagtttattgaacttaaataatttaaacatcttctgaaatgtagtagaaattatgattagccataactagtacagtattttttgcttgtttaatttttttggtgatattccatttgtggaatgagtgtgtgtgtgtgtgtgcagtacagacagaaaggagagaaacatatctgcatgttatgttagaaagagtagtgttagctaccctaccaaatttacatactggctgaacacagtatgtaaaaaattatttttttagtccattgctggtgttccttgttgttgggtgactctattccacatggtgatgcagggaaccaatctccttccttctgtggctgtgtaatcccttgcaaccttgaagtcctctgcatctaactttaggatgaggaaagtgaaggtggaggatatagccctcttgactgccttgacctggacctggaacatctcttttgctcccattccatggggaagaactagtgacatggtggcccatagctgcagaggggaggctgagaaatgcagcctctggataagaagcctactcccagtggttactgtacattgtgggagggaagcttgaattctgatggacagtgagaaccattctccacacaataacgaaatgacgtcttctcaaccttggcaatgtagcatcctgtgacttaagtatgtaaataattatcagtacaggtcagtgaaaaattaggtcacctttcccttccacttttaattctatagtttaatttgcctatctgctacatattatatatatgggaatagataagattatctataaacatgtataaatttgtttcctacactaaaaagaaaaatgacaaagaagaattaagttagttgcccaaatccacacaataccaccaggagaaagtctaggaaccataccttctaaatccaggtctacacttctttagtgcactaaattttttcctaatatagctctgaggagactggtgtttaagaggagaatgttaagccaaaagcccatttcacttggctctgtacagacagtaagttaatttccaggatgtataactcctgattttctgtgatgacagagaaaatactgacctgatttgggtaactctgaggtttggagatcttgaatagcctcatgttcctgaacttctttaccatacatgaattacttcttaggaagaaacatttattctgtagaatttggtttcgcattttatttttattttcttagacactggtagttggaaattcaggaagaatttgactacaaaaaacatttattaaaaagagtttctaatctcacctgctaagtgctacaaggaaaaaaaaaaatacattttgagccctcaaggggctccaaatacggttgaaggaaaattagacccagaatagtatatgattaggaacaaaacgatggcagagaaatgagagtttagagaaaggagagataatcctgagttaccttaggaagagaaaatttcacagagaaaacggcccccacactgatttggggaagatgattcagacttgtctcaatggcatgaggagcaggggccagatgggaaaggacatcgtggtggaaatgacacgatgagcagaagcttagaagtacttctgcttcacgtctgtgattctgcctctccccttgtttctgcagtgctaagttgagtgtagttccccacacaaaccctgagctttcttcccctccaggctgctccatcagtcagacaggagtgccttctcaggggatcctcttcctcatcttatcgggccactcatctcgtcgcagacattcccatactcctggttgacttgctcttccctctttttaactgacatgagcaggcatcacctcttccaggaaacttccctgacaccaggctgagtctctctggtgtcggggaaggcttctgtattactgcatctgccattttgatttaaggttttctgctcattccaactcaacagtgagctctttgagggcagaaattgtgtcttattcatttttcttgttatgccctaaaaatgtattgtgataatatataagtaacgtacaatttaccattttcacctcttgaagtgtatagctcagtggcgttaagtgcattcacactgttgtgcaaccattatcaccattcatctccagaactttctcatcatcccaggcaaactctgtatccattacacaatagctctccatttcctcctgccctcagcctcaggaaacctcccatctactttctctttctacgcgtttaactactcatatagatggaatcatccaacatttttccttttgtgcctggcttatttcacttgacataatgttttcaaggttcttttatgttttcttatgcgtttttatatctctctatctttgatagcacccaatacatagaagacaatgaatgtttttgtgagtgaaaacataagaccagaaagaaataggatgtcatattctagggacactcaagacactttcttgaggacagaggcactgtagcttggaatttggaagatgaggttggcaaggtgggtggggaaaggatggaaaagtgatacgtttcttgaagcatgtggatttgcttccataagcagtggtggaccagtgggcacccttatctattaaaagaatgattttttttgtgactcgtgtagagcactgtcttagttacctaccccagtggtagataagagaagcggattaaaaagagatctgaacctgaggaaatggagactaccaagttttttgtaaatatgtctgttataacatatattatctagtacttgcgatgcctgtgccaaagcatgctttttggtttagttaagcctacttagctcgctaatttcagtaattttggcttgaattgcaaaaagttgatgggggagatgggggagtctctgacatccttcccccactcacaggtttgaaaaataaaattatgaagagcaaaaggatctttttctgtggtaaattgtacttcatgacaataaacgagttgtggttttagtggttaatttataaattaggccatctggttcttctgtaatctaaagatttttatatatatgtaaaatacaaagttgtcctgggcaactgccaatctataaaggagaaaacatcttgaactctgtggagataataaaaccatattcagctgccaaagtgctgctgacatactgtccaatgagacacccaacgcctttgcattacagccagcaaggtgtggagctagatgtattgatctatttaataatattagcttctcttctctgggtcggacttggcccagagcaagtgaacaggacctatctatctccttctcaaaagtcacagctttcttaccaaattgtacaactcaagccacaaagaaaacaagtcaaggaaaggaccagaggagcacgagggcacatgccttgttcccagaccctgggaccagctccagctctggctccttgcagatcccgctcttctcaagttctctggctttgatcctagttttctgccctactattcctgacatgtacagcacttagcaattcataacttgctttattaaccaatatctcaacagaacttttaaacaacctgggaggaagcagagtgggtgttactgtcctcattgcacagataatgaaactgaggttcagaaaggttgagtgtcttgcccaaggccacacggcttcttagtggagaagccaggatctgcaccaatgtcttccattggacacactgccacttaatatggtacttagtttttctttctagatgaagcagtatgaggaattctaccatggatatctctctctatttttttaaactgcaaaataatgataatgataataatgaatacttctagaatacagtctctatgccaggcactatatgctttatatgtactaacttgcttaattctcctaacaaccctagaaggtagttactaatattatcactatttttaaatggggaaactgagttacagagatggtaaataagttgcccaaggtcacagaggcagccagattagtgacaaaagtttgagagtactcagtttgaattttacatgttccgtggatatggtttatgccaaataccttctcctttctagacctcagtttcctcatgtatcaaacaagtggactgcactatacaactctgaggtcccttctagcctgaagattagagtcttttatgcccacatgatatggaaaacattaatgctggctctttaagactggaaccttgtcatttaaaaaaataagctctactaaatttgcagtaaactgtccaaatacgatctctggtctctgatttgtatctctcacagagcatgatacaatgctagacacatatatactcattaaaaacttgctgaattaaattgtaaaacattcctccagatagaccgtaagggtgagctgatgccctaatatgctcctcagctgctgacttaggacccgtgggtgacaaaccctgtccttgttgttccatctgtgacagtgggcagtgtccaaaatgagtctcttcatcaaaagtgagtccaggaaactggatcagagtaagtaaggagtcttccttgcttctttttctctaaaatacaatacagtgcattctagcaaactaccagcatgcctataaatctcattttaaaaatatcaggaaatagatgctcattgataaagagggtaagaatgagcaagggagagagtcaagcctgtacatttgtgcttagggtattttcatttgagaaattatcattggaaagatcaatttccaaggcaggcgttttgtcttgacttaataaactaatctttatcaataataattaaataatgtcattttcccagatacaaaggggaaaccataatgcctttcatatgccttctcatatcttcagtgtttctcaaacccagctgtggggtctttttagggaagatacaaggagggtgagaccatgtggagcacacactcagcagccactgtgaagtcatgggtcccttgctacctttggaagctgacaatctgcatgaaaagcagcccctaggaacatgggtagtggcccgggatccaaaactcctgaatccataaaagggcttttgacttcttgttccaggacaagtgacatctgacatgcttgcctgcttgtttgcctttcttccttctcctatccgtctttccatccatctgtccatcagtctatctgtccatccagtcatccatccatccttccatccattcgtctattcatccatccgtccttccatccatccatccaagatttattgagcacttacatgacaggaagtatgagacacaaaagaaaattctacacaattctcctagggacatgaactaatggttagcaaaaatatatgggaagtcctgcttcaagtaaaattatgacttaagatatacatcagatatttgaaaaagatatttttaagttcaacattgaaattctaactacattgtgtccttaatttctattttctagttagacttttttgaagatacaaatcatttgaattatcattattattgttacttgattttatttattccacatgaatggtaagaattttaaaggaaggtgggtgccctaaaaatacatttatgccaactggattgaatcaccttgaatcacaatgagtacaacaactgctaatgagctaacacttaatgagtaatgaccaggcaccagacactgttctagcactttatacttactgatttctttactcttcatgataaccctatgaggaaagtgcttttttgttaagctccattttcagctgaagaagctgaggcctggagaagttacatagctttctcatggtgtctccactatgaagtagctgagctgagatctcacccaaggccctgctgggttcaggccacactcttaagtactcacagctgcatcacactgaatatcatctccctgcactgccatttcatttgagcagggctttgcctgtcaagaacattcatatcttttgataaacagtgcattttttccctgatagtctgtatgggacagcctccttgtttgcatctgaaggacagggacttcaggacctcctgctgtggtcaccaaggaatcacattcaaacttctcagcaaggtgttatggtccttctcagtttgcctacgatccattgaggcaaaggtttccttctctcaatacaccctctgctttagccagggggacctcccactgtcctctctatgtgttctatttgttcctgactgttagtacccgcttgtgtggtttccatgatccttcttctgcctggaatgaggctcctcttgagtcctgagagcttcatttctgtctgtcttttgggctgtgccaaagcccctctgccttcgtggactccccactgattcattaccaattttcctctcctctgggctcttcttagattgcaaatggtgcctctggattgggtaccaagacttgcagtgccttattttgataccactaatatgagaccatgttatatgcctcttgagatatcattccctttctagcaatagacagtgataagcatgcgtatagagggtaaacgtaggactttgaggttcatccatctcaatagacaaaagtaaaagtatgctaatttcaatccttcacacagtaaattgaatgtaataggtcttcagtaactatttgaggaatgaaattgttattgatatattgatttaactgagcaaatccataagtgccacgcttggagtaaagtacagggaatctcattttttgggtaatttcaaacaagtaggagaccatccactatctattaaggacaaaggagatttgagtgacaaacatgttccagaccatccaatggtgttattctactacttcatcccagctagtaaaatggggcaataagaaccaaaaagcaggtactgtccctatgtaagtagacttcctagtcctggccaaaacaaaaacaaaaaaaaaacaaagcaacacaaaacaaaaacaatgtgtgaagagcatcttaccgttcattgctttggatgatttgtgcaaatctagttaatgggggtggatctgatcagtctttgtaggaagtcagtattggcatatgtctggcttctgaattttctaaaaatataattatttatttttaaatccattcaatcaacactgaatttactaatcaactactaaataagtaaaagatcctatagtagatccttcaagaaatggaaattgagacattaggtcactataaaccccaacccttgtaatctttttgtggcaaccttaggaaacttggaatgctttttacactctgataaaggtttaattgtaatcatagccccagtgttgcaaaatgagtcagaagatacaaagtatctcataggataatattatagctgtaggtacttcaaatggacaagtataacacattatgactgctaatatggatgcattgggaggaaaataagccctaagaagcaatatgcagaaaagctatgattgctggagacagatagatccaagaacctaggtaatttttcagcaaactgtggttccactttcgcctctttcttgacattgactgtgtttttaacagggaaaaagttatctgaaatttttgatagagttcaaactttaaatcgtgttcactttgctaaaactccactggatggagtggcagaagagaaaaaacacagaaataaaagaaaagcagtaatggagaatggaaaatctttaaagatgctaccatcctgaaaagattcgaaagcaagcccaggaaagccacggggagggaaagagcgcttagaggtgtccccaaagctttcagaagtgatgagggaaaccccagctcttcttgttacttcttggcattttgttcctctatacgttagcttttggttaatctttcatgttacttattatctctgttttaaaatttcacattaactcattggtttcatatcccacttaacaaattagatattttccttgggcttattaagaaaattatttgctctcatatgttatggctttagattttctgtgtagctaggactgttcttaaatttttatctttacctttgttatttctctgaagcatccccattggggtggcagtggggggtattaaatggttatgtaaaatttacatgtaattgtgcaatttacacatagcctcaaatataatgaggcctagtctagctgcccataccaagaggatattatagttgccaataaaatcagtattatttcttttttttttctgttcttttttagcttcttgcaaacattcactcagaatcctttttgaatatcagttttgtgaaaagcaccgtgctgggttctttgggaaaagccaagatgagggcaaatgcatcctccttcctagtgagtctagcacacagatgactcaggaagtcatgcactggaggaggagtatcttctagaactggggaaaggttaaggaagggatcagaaacctttttcactcaaccaattacattttcctgaaagcatgttattaatcgtacatgatcttgcagaccccagatagagactatatcactatatcaattgttttcttgaacaactggagttaattctcatatgtttggttacccttcaagtatttatgtttaggatctgttttcttcctcttaacttacattccaaagtttaggtatccttcccctccatttgctgtccaaaacagcatcctttcatgtagctacatgccattggaatgatttggtttttgccatggattcctagtcctaaatttggacttttattggtatctaagatgtcatggacagaacccacagatgttgtacaaaaagggctgagtggacagtccaacagagttacatcatctgttccaaacacccttgtaatggttgtatcagcgtcaatgtctgagttgctgtcctggttctcctggccagtcctcagctggccatgcctgttcaggcaccagagaaagcttcatacctcaggcaaatctttacaagggatttgaaaggcaagaaacatgtattttggaggttttacctgtttatttcatgtatagcttcatattaacagattttgctatcacttaaaagtaaataaaatgattttgatttctcaaaatcatcttataatttattaatctattttaaggcttgcatttacatttaatcttcaaatcttgatgcattttcacagagtttctttagttagttaaggatattaatgacttcctttaatagttgatgaagtgagtcatcatcgacagtgagtcactaaggccaactcttgtacctgctcttaaatagcagttgttttactagatttgtactgaaacctttttaaaaatctgtttgtcttatatataacaagcatttccagtagttaataatactttcttagctcttcaatcattttatgagagcattacaagaaaagcaggagatggggaaagagatatcttgtttgccatgtaggatgcatgaaattcttacttagtctgttgtgttttggattcgagagaaaatatgtaatgaatcaaaatgtttcctacagtcctctgaaaagatgtaatgagacagtcttccagcagcctttgatcatctgggaagtcattgactttgatccttatcctatcaggggctcttaccctggggtccataaatacccaggcatttttaagaagtggatttcagtataacttgtttcattttgtgatttttaaaaatattttgttttatgcacttaaaaccttaatctgagaagtcatctgtagactataccagatttccaaatggaataaaaatatttaagaactctcttatgtgtgtgtttcaacctataaattttatatgtgtagctcatggttaggtggtaagtagagaatttgctatctgtgtaatatttggtactttttataatgaaaaaggaagtaatacaatgataggtaccatttatttgttgaccacccatattttccagggaatgtgatagatactttttatatattctttctagttttcaccataacatgctgcagggatagtgttaccattctcattttgcagatgaagaaattgaaacccagaacaattcgttcattcattcaaaaaatatccatagagcatacactaagagaaggcactctgctaggcaccagaaattgaataattgaccccaaatcacctaactcataagtggcaaagctggacctaacaaagcccattatcccttctatcacacattccatcctcataatatcatattctacatagaaaaacttaacagtcctgttgagacacttggaactctaagaaggtagtcaacagatacttttctctttatataaatatgatatctaattagcttttcctggaaaggagtgattctgcctttttttaattctagcattccctgagcaaattagagcccaggtaatgatttcctgagataagtcaattctcttctaggacaatctctagtcttgtcatcatgagatggaataacaacggtctatgtcatttcagtgacggcacctgcatgtccttgtatctaagaaaagacacctccttctctgccttgctaaatatttgtaaactttgctttaattggtatatgtgccactgttttgtatgtgggaggggtttatggttttgttttgttttttggtcttttttagtaaccccaatccaaactattctcatttgtaacctaaaatacttagaacaagaggctttgcaatcttgaagaccgaatacatttttactactaaatgtaaggcagatttgagccacccattttgtagtgcttgattatggcaacccgaggaaactaatacggttactctttatctttattaggaaatactgctgtagttcctgttgtaatccttagggagccaacattgttgatgagacctagtaccaagccagaggccatgttgaactagcaagatatgggatagtttttactttcaaagtaattagcatctagagtctagagagtttctcttacagggtggcctggtgtcttagtctattttctgttcctataatagaatacctgagactgggtaatgtacaaattataaagatttgtttgactcacaatcctagaggctgggaggttcaagatcagacagccacatctggccatcctttaatgagggcctcatgctgtgtcataacacagcagagaattggaaggagaaatgggcacatgcaaagagaaagaaaggggacgaaaggggctaactcactttgtaactatgagactaatccattccctggagaactaatttattctcatgagaaagacatgaatacatcttaacatcctaatcacttcttaaaggcctcaactctgtacactgctacattgtaacaggcaattaaatttcagcatgagttttggtggggacaaactacatcccaactgtagtacctagctacccactttatttttagagtggctatttaatgacctggcaagatctactgtgcttgtaaaagaatccaccatgggttaaagaaaaatagtttctggcttccagtctccttttggcctctctctagaatggcatatacaagttcagtggttactgacttcaaaggtggggtggaagacactgaaatgaatttttctcctttctttggttggttgctctctctctttgttgctgaaatttgtgtaggataatggaatgaatatgggagatagggaactatagaaagactggagggaagggagaagtcttttctgaattaaccccccatgtgcttgtgagacccttggaccccaaagggctcctgactggctgggcccactccttctgtatatggagccatagggcttttctctggcttcccagttgaagcattgtcatatgctttgatgctcagcatttctggcaattttaccttgtaaaactcccgtttcgacattctgaacttaagtagaaaatgggaatataagcctcttgttttttgctcttaatccattccagaactataagtccctgggttcttggcaacaacaggtgttcctctagattttaaatcaagtgtgtgtgtgtgtgtgtgtgtgtgtgtgtgtgtgtggaatatctcactaaaacgacagtgttgtcatcaattttggcttcatggagggtcttgagctgggtggagatgggaggaagctatccttgtccatgcggtttggagacttgctctaaaaaagagaccgtctacttccctcgtagtttttgttttgaagacatttgtagtgtttaccaggagcatacagttatctggaaaatgcagactgatgacaatagtatttgaaatgctcgtagatctgcttctaggttgatggaaagaatgtatgttccaaggtacaagtgcttgttgacttttcggatgcagccagtctgtgctctttgtcaggtaactcggaatcactccacagtagctgtccttcctgtccatttgacaagcacttaaaagggcagtcttaagtactttacttcatagtttattaattttttcccttctttagtttgcaatctactctcagaaactgaaaaataatttcttttacctttttcccctttctcatttaagctgaaattgatttctttctgagcgtgtaaggaaaaaaataaaaagaagctgtggttaatacaattgcctttgctgaacaaaaataaaagactagtttaccttcaagctgtgctgtatcagagtaaggatctgttctgtcactcccaggagattttgataagagagagtacaaaatttcataatatctacatagcataattgtagcaaatataagaagtattataattgtttatttggggatgagggtggggatgggtttttttgtgtgtgtttggaaaattgggaagctagaagatactcttaaatccatcagcttcttcagaactcttctcaaatgcttattgtcatgacaaccatctcttcataaaccaaggctctgagtgtaatacagatggggctggtaacaaggtaggattgccatctgctttgttttctctaagggacattatttttttgtgatccccaagtctcatcctcaaatctgaaagtcttgacttatttttctttctggagtcagatagagctgtgagattaattcttttctcctgacaaactacttcctcacctgtcatcaaacaacttacttgttaaatggagggaaaaaagggtaattatgtgtgtgtgtgtgtgtgtgtgtgtgtgtgtgaaaacaaatatacatattttaatgatttatttatctgtctactttgcaaagtctcctatgaggtacctagtaattcaataatacagtcaagtgtgagatccagaaacaagtaggagtgaggcaatcattttcccatgaaacaagtaaaattattactgcttttgaacattttaacacctgtgcttcctgatggtggggctgcatgaagtttgtaagtagtgtcatcattctcttattaggtaacaaataggagcataattatttaggagaggaaaaccttttcttgttaccaaatttggtgagaaatttgccaaagaaatgaatgcttacaggagggatacagcttaatatcttcatactcccctttgtcaaagatacaaatgacattttctcatatcaacttcctacaaaaagtgaggccatacatttttaaaaagaatatacccagtattttaaaagtttgtatatatcgtgatcagaattaagatatatccagcttttgaaaaaatatacatatttagccattaaaaggtatgtggtaaactaaactgatgaataaaggttatgggaaatatttcataaaatttatatttaaagtaaagaacaatttctctctttgtattatagttattttacataagctacaatctataattctaaaccttaatttcttgaagggctttataagcctcatttttctttctaaatagagaagttcatacactgcttttatgtcctatatgttgatgtgtaaaaataatcaaatactagtgggtgagtagaatgtaactacaatatggtacacacacagacacacaggatgactaaactgtgcacatgagctgatgtccagagcagggaaaagctgctaaagaatgtttgaagtagagtcagaatgcagttttgtggttaagaccaataatttttcaaaggagcattataaggagtgtggttacttgggttggagttgaaaaccaagcaacagttgggcagacttgaaaccagttttgtctttaggtttcttttcttaatgattggtctacaatgagttagccactcatcgtatttaaggtcttggtaaaggagagactttctttgccatgtagtttatacctcatgtatgcattacagtagagagctccaggaaatactgcaggccttctactggtttttatcctctatttagataaaaatgaggaagaagtagaattatcataaacaatcctgttggcttttagttgagatatactacagaaacatcacctttgaatctgtatatgtaaaaaaaaaaaatctcagagtaagatataagttctgttgcattgttctgaaggaatgggtaatgtcagaaatgtcttcattacattacataaagtaatacacagtgctgttatcagattgcatagtcaaagttggcaagtttgcatatttacatagatatcatgaccttcatcattcatacttctttcaagaaatggtcatcttaatatggggtatttatttgaggcatacaccatttattttaagaagcagtacctttgtttattgtaaaacttctggactaaattcttcaattttttctcaaatgaattcagttttttgttttttttcttaccactggtttttactgcatagcgtttgcctgaagaacaccactttgtttcccaaggcaagtagtcactacaaggcgagttttgttctgtctatcccaaggcaaatagacagcagcaaacatagtgtggagggctgctgggttcagtagaaaaccatcaactatttctaattgggggtgtatgaagacagctgcattctggacatgctaaacatcttgaaatgcttggagtgtaataaaaccccaaacgtgctttcttttctcatttctttgcacatgtattttaggcaaaatataatccacatgctgttgttccctctccttttaaatcatgaaaaatgttgtttttatagggctatttgaggtccaggatgcctttttatcctttttattaggttatttttatatataaatgaaaagaaaaacataaacagaaaatacaacatgacatcatgaatgagggcaagcacaaactgcccaatttaagtttgaagttataaacctaaaatattttaaaacaaaacatttctcttggtgttttgcaaaagtaatgctttcttctattgggcagaaattgcagcctgttgggatgaaggagagaatagaactaatatttattgagtagctaccatggctttctgggacatctgctaaccccttaatttttacagtaaccctaagtggtaggccagtccatctgcattttacagacaggaaatgctttcagagatattaattagatggctgtagaccacagaagaattgaaagtcaggtcttcttgacttttcagctcatgacttcattacttctgccctcctcattctgttgggagatgggtgggagtgtgccctccagataatcagaaagtcccatgttgggatgtgatttggaaatagctagtcctcaggcctgtggacgaaggctattgtagcctcaagaaagaaagagtcagcttgatattggcaaggtggttatttagtgtggcagctgcataagagcattggataggtggtatgatatgggatgggggtcagggtgagagctgctcacacctccttattatggcagggcaaaaccagaatagtcacagtgatggtgatgtagggtaggttcaagagaaagctcatgttcttctagcattgagactcacaatatttcaaaacaagtgattatttattccattactatttattttggtgatggatgttgcatttattttattttctaacagtagtacatatttggtaagagttgtttgtgacattctttatttaaatggattaaacccattttcttaatttttttaagtgtttgtcctgttatcgaagatatcttaaagtgttacagaatgggaatcatagctttaatgagtctgcatataagagagtccaaacattttttttttggagagaaggaaggtcatttcaactgtactataggaacgatagggcccatgatccatggtatggcaataagttactattttttggagaataaatcgcaaaatatgggacgtgaagactgcttggtatttacacaggagtctagttcttctgatactatatattctataagctttctcccagaaatccaaagttttatttagcttgtagccatcattgtgccacaatcttccttccatgatttatttttttcccatactgtactcttgcactgagtctttggcattgaaagggaaagagatgaattattcaactcttcttctattgagtgaaaagccaatacagaaaaaaaaatgcaacaggcaatttcatgactgacattttggagaacattggggtcatcatatgactgagaaaatgattatctcttttgaaggtcaggaaaccaatatttttttttccagtgaatctactgagggaaccaaccacctagctttttgtaaatagcactcctcagggaaatgttgcttttttcttttgcagtgtttctgctttgaatcttcatagactgtatcccatggaagcaggaatataattactgtagtgcttactttttttcatgtctctactgaagagccaccctgatttatcttttactccaaggtagtgtggaactttacaaggatttagattatattagtcattttgcttggagatctctgcacacttttcaacatcatttctaagagccttgccacactcagtaaaagagggtgaggcttcaagaatctctgtgtaccaacgcaaattaggcaatttgtaagaagtccctagtagagcagagtggagagagggctcaggatctcgtgaggcctggggcagggaggtggacatgctatgagctcctttcacagtcaacacaaagttaacacatcttggaggaaaaaccgttactgtataatggaaggcagaaggcagggatgtctgtgcttggtgatgaagctataagtagtgagctgatttatgatggaggggtgaattgtgccatgaaagagactcccctcaattttattagccagattactgcccatatgcggggtgaggagtgagcattttaaggcatttctctctgttttcaatatatcatctctggattcactattactgggacttgtgaatatagactagggattaaaacctgagtttgcttttaaaaaactttattttattaaatgagatttctgagcaactgatttcacttagtcttatcaaactattcttactactttttcgatatgcattctgtccctcctgtgtgaaggccacaggcccatggcccccatgtcattgagatggaggtcctcaagtgatggcgggatgaatcacctctcacttgccacctgcgagaatgtctatcactgatacctctccttatgtcccgtagcagctgctaagctcccacgttattattggtgacactttctagtgttcaggagagaacaggatttactttttgaatgcctctaaattattatagcaggttcatttggaattgcatatcagaacattcttcctgtttatcaggaaaataaaccaaggtcttgaaacttgatgtctatccatagttggcccaatataattttgcatgtggtttattacattatttttctccattggctatgaactgaaggcatctcatggatatttattccacgctgaaaaggtagttagatgctgtgtggtaaagtcgagaccagtatattggaagaaaagagacactccatctaataatctttcatagtcttcacattcattgagaaggttacttgataacctttcctgcacactctctcccaaccctgacccaggaacttgcagagcacactgtgcaacagatctaataacccttgtctgcaggcaatatgcacagctgggaaagataattaaatagactctttttgagaggtctacaacatttcaacggaaggatcgagcaatccggctggcctccgactgaaaactattaccaacagacatacttcagacagattccatgatcaccatccttatgtggcacaagtgcttatggggagcttctttggcttccaaaaggccactaaaactgtcagacctaaataatactggaactgtaaagtgggaattaaaaattataattccatttaacatgtaacgttctcatcagaaaggggcctttggttttccatattgatcggttacatggtcagctgcaattgtaactcatgagacacacccagatatcatcctgcgtgattctttttgaggtttatttagggtgttagataatccgaggtaggtttcatcatgggtggcaatattacatatagcaaatgtcatgagaagagagacaaagcctcccttttgaatgttaacatttatgcaataagtttaatgtaccgtgtaagtttacattactattatgagacttaacctaaaaaattggggtgaaatcttaaagaattatgaaattaagaaatgaaaccagagggctttcgttttaagtactgatcacttaaaccaaaaccagtttggcttatcctatgagatcgtgggtattgagaaagaggaacatttgctgctgcatccggagatgtttccttgagagcaagactagttccttttgacccagtacatcctacaggtaaatcactgcatgctgtagagatacctgttccctcccttcccccaccccctggggatctgaaaccaaatcattgctttttcatcttttacttatccttataaacaaagccacccactttctcatttttcctgatgccaagtccttctttacatgagtggaatccactcttttcaatggaaagacacctgctctgagacaggctacactgtcatgagccttggcatggctgagtgatgtagtggaaggtgcaataaatttaaactttaaaaatgcaaaatttgatggaatcatgcatcttgtgcctacagtgagtatatggtctagcaggatttacagatacatgcatgattaatttgaatacagtatagcaaaatgatctgttaaaaaacacatgaaaagatgtgcaaccttattagtcattaggaaaatgcacataaaaccaccgttcctgtgtgatacctctgtacgtctattagaatgtataaaatttaaaaagactgaacatagcaagcactggtgaggttgtagaccaactggtgctttcatgttttgctggtgagaatgtaaacattacaactactttgaaaacagtttgacagtttcttaaaaagctaaaacatccacctggcatgctatatacagatatcctactcttacgtatttaaccaagagaaataaaagcatatatccattcaaaaacttgtaaataaattgctcctagcagctttatttgtaatagccaaaaactagaaacaacccaaatgtccaatgaaaggatacatcgtatttatttataggacatatccatgcaatggaataccacttaggaatagaaagaatcaactgttcatcatacatacaaccacatggctaagtcttaaaaataattatgcttagttaagaagtcagacaaaaaggtaagagactgttaggagctgaattagcgggttaacagtggcaatgaaaaaggagaaaattatagctacctcaagatagaattgatgagctttgattatgaaatgatggtaagagagagggccatagactctgaggtctgtctctagctttggtttccctatgtggatcattatctatttggatataagaattatctgaaagatgatacttaagcatgtaagaaatgataagctacctgtttaatgatgagcttttgttacctccaagaaccccaagaagaaacatcctgtaagcagaccattcatacttgattgttaaaggaaaacaaaattccattttgtctttttcatcaacacaagtatagctggctaataaaagtgtaatattcatgagagaaaaagaaaagaacacgcacacacatacactcaacaggattcctagagtcattcccatggataagagggaaggaaaggttgagggcaaagagagaagggaaggaaacagactatgatgggatatcttagggcaaaagaatagggggctgatttggaaggcagcaaacttcatggatacttgatttatttaatgtccctgtcactctggcgtatcttaatgtgtgtggtgtgtgatttatttagtcacttgatccaaattctctaattaagtggagctcagaagatatagtgtccattgtggtcaagggcacaggttttggcttcaacagacaaataagctctctgagcatctgtcttctcatctgtacaatgggaatatcagttcctacctcttcaggttgttgtattcataaataaattgtgtacaagaaacattaggattgcttcttacccgtagtaagggctcaacaaaccttctcctccttctcctcctccttctccttcttcttcttcctcctcctcctcttcttcttccttttgcttttctccttccttcttccttcctttcttcctacctccttctcattattgttattaggtaaccacaatattatcagtaatgattggagaaagctttaatctcctagttcaccattagaaaacaagaacacattttggtggttattacccgaagtaatcataatgtcacctttttttccatctgactcattatcccaagtgatttatttatatatggagttttctgagtctttcttttacatattacaaaaaaagagtgtgatttagggacgaagcaaagaaataaaaatttagtgactttcattctgcctgtgccccaattcctattgggcataaggcaagtaatttaaatttcttagcaccttagcatcttctactcaaacagaaatgaggaacagtcacaggttactattatagctgtctaagtagaaggcacacaagttttcacactgagtataacactttatagaaagctaagtgtgttgctcaagttggtacatttctgtagatgtgacactatggcactaagaaacttaatgccacattgaaattcattgagatagctagactttaaaaataattacttgacttcactataaagtatgttcgtattgcatttactccatctagtagaaaatagaccttgtcagttcaaatccctgttgcattaatttcaccagtaatgagtctttttcatttgagtcagcagggtttttcttgcttgttttcaggctttgtggatttgaccctccatgatcaggtccaccttctagaatgtgcctggctagagatcctgatgattggtctcgtctggcgctccatggagcacccagggaagctactgtttgctcctaacttgctcttggacaggtaagtgacctggctgtagcttaggagtagcatgttctttacgatcatagttcattcatgaaactattttattcatctctcggtgaagcttcagagaactttattaggtatgtttacttaacaaaagagtgcattgggggtgatgaagcctagtcaaattcacagaaagctaaggataactttctgctagacattacctcagaagaattctattatttctaatacacacacacacacacacacacacacacactcacactctctctctctctctctctgtcattatgaatggtaattttctaactccatcttcaacttgtatcatataaaaattataataacctctctttaattaaaatctgttgttgcttcttgtacatccataccacaatagcctattcattttcttctccaattttcccatccgtaaaatgaagaaatttgaccagagttctgaaggtcacattcaggtcgacaaattcattttcatgttcaaatatgttaccttctttaacataccattctggggttgccttggaatgtgggtcccattgttttttttttttcagtcattgcttagagtcatagaatttagatattactcaatagcagctgccactgatagagtctccaccctgcaccagctgtgatgctaaacactttacatatattatctcatttaatcatcaccggactcctaggaggcaggaatgtcatcatccatgttttaccagaaaggaaactaaatctcagagacatcctgctacttgcaaaaagaggaaagctcactaaatggtggagccagagttcaaattcaagatctttctggctccggtatgctctgttacctcctgtgctgggcacatggtcttcccactctcatgttcagtgatgcctcctttggtctgctgccatagcattctgttttccaggtaaatcttgtctttgtgggctacataacattttggatgagaaagaaccattttgttgtttcttgcaatcctattttgcctccgtgccaagcagtctaaggctgccaggctgcccacagtgcatctctgcatggtactttacttcagagcatttcactatctttctacacctgccaagtgcctggagcagagttgcagcaaaatttatttaagtactggagaattgtacaaggtgttggttattgttttgtcattttgtgttaacacagcttttgaaaaacagtggtgatacagtttaagaagcatattttgctgtctgtggaatatattttgatatcacagtttcacaaaattatcaagaatggccactagtcttgttccttagaactgtactcacaatgtattctgtcagccttatagaggatgtctttaccgtgttctttcctttccattccttgtttcctttccattttttcctatctcatttctcctctcttttcctttgctttcctctttctttctttctcctgtcctcttaatttttttgtcttatagcagtgtggttttgtaaccaagtgatatcaagtttgcaaatgaaaatcttagaccacacgtaacatttccctgcctactgcctggagtgtctaccatgtttaggtttttggacattcataactcatttgctccttgatttccatcctcatctgtatctatcttcttttttaaaatttaattcaatttttataatgttgacacaattatgcagattcatagggtacacagtgatgttttgatacatataatgtgtggtgatcttatctatcttcttgagtacacacttgcttgaggacagtcatcaaataattgcattttgaatatgtgaaggtttttgacattactgcacccaaaaaactcatattgccagtgaggtgatatggcctaggattttatcagctacagccttctctttcctttctgtacactccagtggtggctaattttctttcctctctcacagaagtatgaatgactaaaagttctcatctctattcattcctactttctaaaacttcagatcggaaatttgaattacctctagaccaggatttgtcagtctctttactattgacattttgggtcagatcattctttcattctttcttggttgaggggttgatattgtttggtgtgtcctcatccaaatctcaaattatagctcccatagttcccatgtgtcatgggagggacccggtgggaggtaactgaaacataagcaaaggtctttcccttgctcctctcatgacagtgaatttctcatgatatctaatggttttataaaggggagttcccctgcacacgctctctctcttccccgttgccatgaaagatgtgactttgctccttcttccccatgattgtgaggcttccccagtcacaaggaactgtgagtccattaaacctttttctttgtaaattacccagtctcaggtaggtctttattagcagcttgagaacagactaatacaaggggctgtcttgtgcattttaggatgtttaacagcatccctggactccaccagctagctgccagtagcaacctccacttcctccagttacgataactaacaatgtctccggacatttctacctatcttctgttgtgtcagggggtgggggaggtaaaattgcctctggttgagaatcaccactctatgctttcccaactcaatgttctataagctcctcagacacactgtactctaaactgcacactcactttatcttctgcaacaagtctattccttttcttttctgtcttggtgacatcaacactcacctagacactaaagctagaagctttaagttacccatggattctaccttctccctcaccaaattatccagttaactatcaagtcatctatgaactgcttctgaatccagacctcccctctatccccattcctctgcatggcacaggtcctggttgtctctgctgcagattccttgcttctgcaccactgactcactttcttggtcctgctactctttctttcagtccatctcccatactgctgctggagaaggctttctaaggcacagctgtgatcatgatgcttcctgactcacctttcagtggctctctcaattcttaacatggagaaaccccatctctactaaaaatacaaagttagccgggcatggtggctcatgcctgtaatcccagctacccgagaggctgaggcaggagaatcgcttgaacatgggaggcagacgttgcagtgagccaaaattgtgccattgcactccagcctggatgaaattccgtctcaaaaaaagaaaagaaaatactgtgtagacttcttatcttaataatcatgaatcactattacaagtgtctcaaacgcaaatttctgaagagtcacaggtgacccagtgagcccttgtccaggctaaaaacacctggtggctgaattctgaacttcacacattcgaatttctcttccattgcttctgagagaccctccaccattacggttccttatcagagtcatatctacctataaggctcatttcaggtgccgtctttttataaaatcttccttcaaactttctcctcttcagcctttatatatacaaaaggcttttctttcttttccttttctaagtttccattgtagttggtttgcttttctctttattattctcattccaccatattagttatgattggatgtcttcttaccttccctactagctcataaacttcttgtggtcaaaaaccagatcttgttcgtcttgtgtgatctccagtttacgaagtcttccatgatacccaacaaatatttgttaattgcactggccaaggtcacccaggtggcttgtggccaaatcagaagaatctacatcttctgatagtcatggcagctgttattcccatccaactcacttcctgtgcattgctactcatcaattccccacttattcttttaaaaacattgcataaatacatatctatgtgttttggaaagattttcttaatctataagcgcatttggcgtgtgcttatatgtctgcttatatgccaaatttgaaattccaaatttcgccatttggaatttcaaatggggaaaagcaaagactcttatctttcccataatcaaaccccttatgaagtaaaatccttaaggtctctctacaggttaaaaataattaggtgatatgatttggctgtgttcccacccaaatttcacctttaattgtaataatccccaggtgtcaagggtggggccaggtggagataattgaatcatgtgggttgttttccccatactgttagtgtggtagtgaataagtttcatgagatctgatgattttataaatgggagtccccctgcacaagctctcttgcctgctgccatgtaagatgtgactttgctcctccttgccttccgccatgattatgaggcctcctcagccatgtggaactctgagtcaattaaacctctttcttttatatattacccagtctcaagtatgtctttattagcagcatgagaacaaactaatacattaggtatatgttaatgatgaggaatgtgtataaatacatatacatttatatttaaatattaatatttacaaataacatgatattaaaaatatggtctataattttttaaattatctacctttctaatcattaacatgcactaaatattattaaatttcaatattatttaattaccatcttggtgtttgaggataactgcttttgatggcattgatagatgcattaacagtgaaacattgtgaccaacagcccatctgagattttatacttgtagaagatggcttctgagtgacagctgagaagactgtttatgtctttgccctacaggttcctaacccctttaataaaatagagctctctgatgcagatgacacatgggccttctttttgctcttgtcccatcacattgtacatagtaaacatttttagcaacaaatagtagatacttataactttaaaagctaagtggttgacagctgagaggcagatgatggtaatttcatcatttttctcatatctcaggcattgtgacactacctctgcaaggtcaactgtctccataggctgttttcatttgcgtagaaataggggggaaagatagcttgaagtcatcaggagccctgcaacccatggattaccaatgttgctaactggagcctggatttcatcttcaattgattgtaatgatgtcttgttctctcaaatctttgcaaatctaggcatttataagactatcctgtaggtcccttacaagaccatgaggatgctagaacttaccctagtcttttcttgtaattgcttaaatgttagtattggcaaatggggtttggtgattataagagtaaaaaaacctgctgccatcccacatttgtgagcagaggatacatttcctatcttgtgtccatttaaaaagaatgattgcttgattggcttcctgatgacaacccatgatatactgattctgttagtttataactttcctagtagtcatatgcttataggccaattttatccttgccatgcttagcctagtcacaatttccagttcttctctgtatcctgcagcagtgagttccaaacacttaatgctgtcatctcttcctgtgaaaaccaagaaataaaggttattataaggtataaataaagaacccagtgatttctcttggggtgtgtgtgtccatgtgtgtgtatattttacaagaggaaagttaaagatactaagaatgcctgtgaaagtaatcaggaaatggagaaaacttgttttccattctagcacctaatcctttggtgtgttttggcactagaaaacacaaaatatgtcctctgtgtctactaggaatgcctctcttcatttagtcctgcttgagtgctcatgatggaaaaatatagactgaaaacaggagcaaaagtgttcatcctactcattccttgtggggtctctttgctttcaaagagatgttagagatgttagtaaatggtgttagaagaaacaatgtaaattgcctgtttagtaagatgatccagtttctaaggaactgttttactggcgccttccatgctaacaaattctgagaaatatttgcggatttctcagtgaagccaaagcactctcttttgactcctatttactctcagagaaaaaaactattcatccatttgaaaagcagggaccaattcaacaagcagaatattccctctactaagcctttggccagagagttgttgctctagttctttccatcactcctgcatcaggaggctctgcctgcaggaaatagtattggacaacagaaagttcttttacttgtaggcataaaataggtataaattctcctccttaagagaaaaacaggttgctgcaccagaaagaacatttgcctcttctactaaatagcagactgttttccaatgataaactcattttaaatagaaaaaaaaaagtcattctctacaaacaagaacattttcattttaggttgtttattgtaaatatttcagaaaaaaaatatgcaaaaaaaaaaatgcccaaaaatcaatgcttccagtaacatatttattagctatctttttccccatgtaaaacttcaggtaaattctttgcagattttttacttggaagaatgataaaaaaaaaaaaaaaagttctgaaatgagttgaattcatccacgtgtgtttttgattcacatgaagagtaggacctccctttatattccctcttcaaattctcccctctgaaaaatgggtggtacactcaaaggaggaccgcacacattgtagtagctggggtgttgggggtggaaggagcaggttttgggggtgggaggagcggtgagtgatcctttcagcaaagtcagtcctgggcaggagacggcttcaggaatactgtcagctttactggattccaccatcgctttccaggactgtttaggccctgggcccttgaagggtttgcgtgcctcttgtctccattcatacctcaagaactttgttcatgttaattttttttcactctatcatatggaattgagtaaaaaaagaaaaaaaaaaggaagccaacacttacttaactgctttaatgtataggactctgttctgggttgtcttctaaagtacatttcattcaatgtgtgagaatacagataggaaagagttttgctagtttctattttgactgtggatccattgattctttctggttctcagcccttaattgctcagctgcagataccacttgactgactcttaaaagtctttggtttattgcccaattctgggaatatgaaactgtaagctgtttaggagaaaaactgagaccaaaagaaaggagaagtgagccaaactgccattatgattgccacttcttattgaagataaatcaaaatatccatttgactagaaatcaattgaattatgcactttaaatgggccaattcaatgatacctgaactatatctcaaaaaaggtgttaaacacaggcacacacgtacacacacatattggaattccaggaaaagtcactttgatcaacaagattatcagtcgtcaaagtgcttggaagggttctattggaataaagctaaaaaaaatcaaagtaaaatttctccttaaaaacaaaagcaattaagcagcactgtattataaaatatgctaagctgcaagtcaaaattcttaagagacttaagcctgtaagcagtaaggatccactcaatgtaaagttactccagagggaaaggcgtgagcccaaccaaagtattaatgctgtgtaggaggttaatttgactcttcttaacatttttacacaccacattatgttttattcaccatttattattaactgaatttattaaagtataatcaaaataatatttttgagagtttaaaaatattctcataatatttaagttacatatactatgcagggaccgtcaagtaattccactctgacatctgtatttattaccgccacctgtccatgatggtattagaaagatcctcatttgttttaatggatgcctctaaaatccagttttaagagggggttggccactttcaagtttgtgttagttaggattcagtttaacccagctcaacaggtatttactaagtaccagcatatccatagggcgctgtatgatactggaggacacacagaaaagagatgtgtaagaggcactcctgccctcaaggagtttactattgagtggtagtgtaatatgaataaacaaatgaatctgctcaaaagcagggcattctaagcaggccctcaccagcctctcatcattcgcatctagtgtatcttcctccatcactttctaaacgctatggattctgagtgaaaaccaatcgctggtttatgcatgtatgcatatatgaattcattcttgacattgccatgcagagtatttagtataactagacttattatccatttatcctgcctagaagcatactgtaatatatataactctaaaagcaagatcattccttatgttggttcttttgagctggcagggggaaagcagagtatgttggcaggggtctatcaaggtagatgagcccagtttgtacatctttgaaatattaccaatgccaatgtgttagtactgcttggatctcttctatgacaacagttcttattttttccttttttttgtttgtttgttttttgagacaggatcttgctctgtcacctagacaggagcgcagtggtgtgatctcggctcacttcaatttccgcctcctgggttcaagcaattcttgtgcctcagcctacagagtagttgggattacacgcatgcgccatcatgcctggctaatttttgcatttttagtagagatggggttttgccacgttggccaggctggtctggaactcctggcctcaagtgatctacccgccttggcctcccaaattgctgggattacaggtgtgagccaccacacctggcccatcagttcttaatttgatgaatggatagaggtttggcttcaaataaatggagttagtctgtcaatatctgtttcttttaaaatttgcaattgtttttatttttagtgtcatgctatgtgcccttaatgatctagaattaagttctaatctctaccctggtataattgatttctccctgtggactcctaatataagaagaaagatgaagtttttcttttaatgcttttagagatcttcattaagtcatttaatattcttatttgctatttcccagtgtgatggttaagactgagtgtcaacttgattggattgaaggatacaaagtattaatcctgggtgtgtctgtgagggtgttaccaaaggagattaatatttgagtcagtgggctgtggaaggcacacccacccttaatctggtgggcacgatctagtcagctgccagcgaatataaggcaggcagaaaaacgtgaaaggggaaactggcctagcctcccagcctacatctttctaccatgctgaatgcttcctgcccttgaacattggactccaaaatattcagttttgggactcggactggctctccttgctgctcagcttgcagacagtctattgtgggaccttccgatcatgtaagttaatgcttaataaactcccctttatatatatcctattagttctgtccctctagagaaccctgactaatacacccagtgtgttcttttatcaaatagaaaggagatatagaaaacacactgtccatgtctttgattgttacaccacagcagagaatcaatttcttaacctgcttacttatttaccattctccaatggtgccaattctgagatccatcatgactttatcattagaaaaggggatgtaacaaacatgatgagatgttacgggaatactgcttactgcatgatatggtttggctgtgtcctcacccaaatctcatcctgaattttagcctcccatacttcccacgtgttgtgggagggacccggtgggaggtaattgactcatgggggtggtttctcccatactcttctcctggtagtgaataagtctcacaagatctgatggttttataaggggttttccctttcacttggctctcattctctcttgcctgctgccatgcaagacatccctttgctcctccttcatcttctgccatgattgtgaggcctccccagccatgtggaactgtaagtcctttaaacctcttttctttataaattgcccagtctcatgtatgtctttatcagcagcatgaaaacggactaatacactgcatgctcagtatactcaggcactctggaaactaggtttctacttcggacccctgagagaaaagggttatgtatctccaagtgtggtcatgacaagcatcactactgtgtgcagttgggcctgtggattgagccaccttagcctctgaggaaagcagaacctgagagcatgcttaattcagagtgtgtgtgacttggagtgtggaaaggaagatttccagatttgcggtattggcgactgaaaggatggcaatgctattgatggagattaggaagacaggagagaggtagatgttgagcaactccgaggagtttttcctcatacatgttgggtttaaagtgcagggaagatatcctgaaggttattccaggcagaaatttggagctcagaagagacatcagagctgaagataaaaaatttgagagccatctccgtagctaaaagtgtggaacgaatgtgatgactagacaagataatagagaaaaggtatccaaaggcctgaggtcaagacctcttaaaaggctgacttttcagggttttaggtagaaaaagagtcccagcctggggttaaggcagttttttgggaagtagaggtacaaagttccttgttccaaaggaagggtgtctttcaaaagaaaaaggatgggccgggtgcagtggcttacacatgtaatctcagcactttgggaggccgaggctggcagatcacctgaggttgggagttcgagaccaacctgaccaacatggagaaaccctgtctctactaaaaatacaaaaataaaaaattagccgggcttggtggtgcatgcctgtaatcccagctactcaggaggctgaggcaggagaatcacttgaacctgggaggcagaggttgcagtgagccaagttctcaccattgcactccagcctgggcaacaagagtgaaactctgtctcaaaaaaaaaaaaaagagagaaaaagaaaaaggatggtgaattgggccaaataccagagagatggacaggagtaagaagaaaaagactaaagatttgttcatcaggagctcattgtttctaaagggagcatttttagtaaagaggaaggaggaataaaatgcagtataatatgttaaatctaagtataatttataaaagagaaaatgggggtggaatattacaaaaaaggaactataaaccagctctttgaggtatttgtcagtgaggaaaacagtggggctctagttcttgatagcaacagcatcaaagggaactttttaaactaaaatattatgaatttttcaaactgaaataatgagagaataatacaaagaaatctcatctgcccataatccaaattcagtagttattaaaattttgccccattgcttaatccattaatctcatttcattttgtcctttttctttgtttatttttggctaaaacattttaaagacaaatcctaaatatcatacatcagtaggcatttacaaaaaaatttcttgataatgacaatgccattctcataccaaataaacttataataattctgtgatatcatctaaaaaacagttcttttctacatcaaaaatgtctgtttatagttgatttattcaatttagagtccaaacaagttccatatattagacattaggtcattaatgtctgtctatttgaatttataacaatttccacttaatttattttctccagcttctgtggagactaggtaagttgttttgtagctgtctggatatatctgattgcttccttgcagtgtcatttaacttgttcctctatcctcagtgtttctgcacatggaagttagcctcatagcaggggttggcatactttagcctgcttaccaaatacgactcctttacatttttgtaaataaaatgttactggaacactgtcacatatgttggggtcatagaaagagtttccgtgtccccaagttataattgcattcacttatattttcttctagtaatttttacccttacatattaggggtcaatttggaatttctcttcatatacagtatgcaataaagaatggcttttatatttttccaaatgtatattcagttgtctcaacaccatttattaaaaagtcagtatttctcaagtgatttgagatctacccttaattacacagtaaatttctctgtagtcttgtctttttctaatatgttaattctgtaccaagatttgttcatctgttaatggatcaatatcacatagctttgtttatagaaggtgcacattgttttaattctggccatgctatcccaccaaatattgccctttgatttttcagagttttactgtggattcttccttgtttctttttctatgtgacctttagaattaacttgtttaattctataagtaaatttattgataattttattgaaattatgtaaaatataaattggcttaggaagtactgatatctccatgacattaagtcttcatatctaagaccaaggggtgccttttcatttgttaaatattctttgtgtctttcagaagtgttttcaagtatccttatgtgtattttgcacaaatttttatatttgtgcctattggatgccacgtgcagggttaaaaaatattatacctattttatatagatatatatgtatataaaaatatatattatatatagttataatacataaatatattttaatatattatataatatatacatgtattgtatttatatatgtatttatatgtgtatctataaatatacatatgtatgtatctataaatatacatgtatgtgtacatatacacatatatacacattatatgtatgtttatacacatataaatacatatataaatatactagaaagtccatggggtttcctagtatacaatcatattgtctgcaaatagagattgttataccttttcctttctattccaaagtgtctaaaagattttttcttagctagtggcattggatgacacctataatgtcttctaaaaatagtagcagtcataggcaccatttccttattttgaatattcattcatgttacaaagtttataggaatttctgaattattaagtacttttaataggaatgaaggttattgtcattattgcatcaaaattcataagaaagtttggtgtcaaatttgtgctttgtgtgtagtcttcatcacgctttttttttttttttaaccagtgttaaacatccattacaaaaatagtttggaagtttttctttttttttttcctatgtcctggaaggtgtaagtagaattggaattatttgatctttaagatgtaaaatattggtagaattctacctttgaaagcacctggacatggtgacttcttaataggtgagctctctggaaactttatttcttctgtagtaattggtctccttagactttctattccttctggagtcagatattgtatatcaaatcttctgttaaagttatccatttcttcttggtattccaatttttcacattgagttggacaaatgatttctgatgatgtttaaaaaatttctctggtttgatggttactttgaccgtataatttattttgtgtatttatgcttcttttagaaacttaggtcagctagtggttcctctattttgttgatttttttcctcaaagaactagcttaagtttattttattagttctactagttttctgctttctaactcattaagttatgcctttagctttattaaatccttcattctgctatcagttaatgttttagttcattttctagctttttgagttgatacttaatttattttcatttcatgatataggtaactgatgctcagaattttctcaaagcatccgttttcgctgggccccatagattctaatatatcttactttcattatcattatttcctaaaaattcagcaatttcatgttttattttgtctctcattcaagagttgtttaatagacaatttaatttccaggttggatgggcattttgttttgttttttgttttactgtttataaatacttttggccttgggatcagagaatactgcttgtattacaattattactgaatatttttgtggtctaatataatttcagctttcaaaaatgttccatgtatacttgaaatgaaggtttatttacccttataaagatagaagttaaaatattagctatgcccatgtctatttatcttcttataatttttgcttaatgaaaactaatgatccattatctgctgcataagtatttatgtttgctttctctttattatgccttatggcttttgtgttaaaaagctattgatttatttaatattttggaaggattgaattttaccctatctaatatcaagatcatgactcttgattcctttttgttttcacttgtttaatatatctttcttctatctttattttaaacacaagaagagctttgctttcagtttctattttacatagtctacaatcggattttacttattagtcaatctgagaatacttttaatagatgagttacacaaatacatatttattgataccaacactgtttaattcaagatctgttctattattttatatttattatatattaaattgtcttctttatttactatttattgatttattgaatttattttgctttcaggtattttgtatttttgttctggttgttagatttatgcatacttactcaactcttcctttataaagcattcattttctactatgagcagtagtaaaattagctagtaacttaattcctgagcactctccagtcctagtcactagtaataacgcagtgttaaactttgtaatattaattatacttaagcctctattacttggtttgtcaaaatcaaatgatatcaatttacttccagcacatacctatgaggtaattgtaagctaataataacttccatggctattcttttctcttttttttttttgagatggagtttcgctcttgttgcccaggttggagtgcaatggcacgatctcggctcactgcaacttctgcctcccgggttccagcgattctcctgcctcagcctcccaagtacctgggattacaggcatcagccaccccacctggctaattttgtatttttagtagagacagggtttccccatgttggccaggctggtcacgaattcctgacctcaagtgatccaccccatcagtctcccacagtgctgggattacaggtgtaagccaccgcacccagcctctcatcttatttttattacttatatttttctacattattagaagttataatacttatatgcacatttctttagcccctaaccccattttttgatattagctctattattaagatatttaatgtccaccttcagattatatgctgatgattctctaatcgtttttggttgtctggagcttttttactgtttattttcaggaagagctcatgataactcttttttctttggtttaaaaatgtttataattatttttctctggactttatgctgagaaatttggctgcatacaaaatctctggcttacattttttctcaagtatttttagtgattgcttcattattttgtagtataaaatattgctcacaagaagctggatgccagtctgattttctttccctcattagtgatttggactttttgtctgaatgttgaatttttaaatataaacataaattgcaatacttttattaagatatgtctctgcattgaacattttaggtccgttttcctaggtacatagaatgtcttttgaatatgtagactcaaatcagacttcttgattctcttgatttatagttttaaatatttgtttgggggcgggtgcggtggctcatgcctgtaatcccagcactttgggaggccgaggcgggtagatcataaggttagcagattgagaccatcctggataacatggtgaaaccccgtctctactaaaaatacaaaaaatatagccaggtgtggtggcaggcacctgtagtaccagctactcgggaggctgaggcaggagaatggcctgaatccgggaagcagagcttgcagtgagccaagatcacgccattgcactccagccttggcgacagagtgagactttgtctcaaaaaaaaataaatagggggcggttccaagatggcagaataggaacagctccagtctgcagctcccagcatgagtgatgcagaagacaaatgatttttgcatttccaaatgaggtaccaggttcatctcactggggactattggacagtgggtgcaggacagtgggtgcagtgcaccaagcatgagccgaagcagagcgaggcatcgcctcacctgggaagcgcaaggggtcagggaattccctttcctagccaaggaaaggggtgacagacggcacctggaaaatcgggtcactcccaccctaatactgggcttttccgatggtcttagcaaacggcacaccaggagattatatcctgtgcctggctcagagggtcctacacccacagagcctcgctcattgctagcacagcagtctgagatcaaactgcaaggtggaagcgaggctaggggaggggcgcctgccattgctgaggcttgagtaggtaaacaaagtggctgggaagctggaactgggtggagcccaccgcagctcaaggaggcctgcctgtctctgtagactccacctctgggggcagggcatagccaaacagaaggcagcagaaacctctgcagactgaaatgtccctgtctgacagctttgaagacagtagtggttctcccagcatgcagcttgagatctgagaacgggcagactgcctcctcaagtgggtccctgacccccgagtagcctaactgggcacaccccagtaggggcagactgacacctcacacggccgggtactcctctgagacaaaacctccagaggaacgatcaggcagcaacatttgctgttcaccaatatccgctgttctgcagcctccgctgctgatacccaggcaaacagggtctggagtggacctccagcaaactctgacagacctgcagctgagggtcctgactgttagaaggaaaactaacaaacagaaaggacatccacaccaaaatcccatctgtacgtcaccatcatcaaagaccaaaggtagataaatccacaaagatggggaaaaaacagagtagaaaaacagaaagttctaaaaatcagagcacctctcctcctccaaaggaacgcagctcctcaccagcaacggaacaaagctggatggagaatgactttgactaattgagaaaagaaggcttcagacgatgaaaattttctgaactaaaggaggaagttcgaacccacggcaaagaagttaaaaaccttgaaaaaagattagacgaatggctacctagaataaccaatgcacagaagtccttaaaggacctgatggagctgacaaccaaggcacaagaactatgtgacgaatgcacaagcttcagtagctgattcaatcaactggaagaaaggttatcagtgatggaagatcaaatgaatgaaatgaagtgagaagagaagtttagagaaagaagaataaaaagaaatgaacaaagcctccaagaaatatgggactatgtgaaaagaccaaatctacgtctgatcggtgtacctgaaagtgatggggagaatggaaccaagttggaaaacactctgcaggatattatccaggagaacttccccaatctagcaaggcaggccaacattcacattcaggaaatacagagaacaccacaaagatactccttgagaagagcaactccaagacacataattgacagattcaccaaagttgaaatgaaggaaaaaatgttaagggcagccagagagaaagattgggttacccacaaagggaagaccatcagactaacagcggatctcttggcagaaactctacaagccagaagagagtgggggccgatattacacattcctaaagaaaagaattttcaacccagaatctcatatccagccaaactaagcttcataagtgaaggagaaataaaatactttacagacaagcaaatgctgagagattttgtcaccaccaggcctgccctacaagagctcctgaaggaagcactaaacacggaaaggaacaactagtaccagccactgcaaaaacatgcaaattggaaagaccatcgaggctaggaagaaactgcaactaacaagcaaaataagcagctaacatcataatgacaggatcaaattcacacataacaatattaaccttaaatgtaaatgggctaaatgcttcaattaaaagacacagactggcaaattggataaagagtcaagacccatcagtgtgctgtattcaggagacccatctcacgtgcagagacacacataggctcaaaataaagggatggaggaaaatctaccaagcaaatggaaaacaaaaaaaggcaggggttgcaatcctagtctctgttaaaacagactttaaaccaacaaagatcaaaagagacaaagaaggccattacataatagtaaagggatcaattcaacaagaagagctaactatcctaaatatatatgcacccaatacaggagcacccagattcataaagcaagtccttagtgacctacaaagagacttagactcccacacaataataatgggagactttaacatcccactgtcaacattagacagatcaacgagacagaaaattaacaaggatatccaggaactgaactcagctctgcaccaagcagacctaatagacatctacagaactctccaccccaaatcaacagattatacattcttctcagcaccacgccggacttaatccaaaattgaccacatagttggaagtaaaacactcctcagcaaatgtaaaagaacagaaattataacaaactatctctcagaccacagtgcaatcaaactagaactcaggattaagaaactcactcaaaaccgctcaactacatggaaactgaacaacctgctcctgaatgactactgggtacataacgaaatgaaggcagaaataaagatgttctttgaaaccaatgagaacaaagacacaacataccagaatctctgggacacattcaaagcagtgtgtagagggaactttatagcactaaatgcccgcaagagaaagcaggaaagatctaaaattgacaccctaacatcacaattaaaagaactagagaagcaagagcaaacacgttcaaaagctagcagaagacaagaaataactaagatcagagcagaactgaaggagatagagacacaaaaaacccttcaaaaaatcaatgaatctaggagctggttttttgaaaagatcgataaaactgatagactgctagcatgactaataaagaagaaaagagagaagaatcaaatagatgcaataaaaaatgataaaggggatatcaccactgatcccacagaaatacaaactaccatcagagaatactataaacacctctacacaaataaactagaacatctagaagaaatggataaattcctcgacacatacaccctcccaagactaaaccaggaagaagctgaatctctgaatagaccaataataggctctgaagttgaggcaataattaatagcttaccaatcaaaaaaaagtccaggagcagacggattcacagctgaattctaccagaggtacaaggaggagctggtaccattccttcggaaactattccaatcaatagaaaaagagggaatcctccctaactcattttatgaggccagcatcatcctgataccaaagcctggcagagacacaacaaaaaaagagaattttagaccaatatccctgatgaacattgatgcaaaaatcctgagtaaaatactggcaaaccgaatccagcagcacatcaaaaagcttatccaccatggtcaagtgggcttcatccctgggatgcaaggctggttcaacatatgcaagtcaataaacataatccagcatataaacagaaccaatgacaaaaaccacatgattatctcaatagatgcagaaaaggcctttgacaaaattcaacaacccttcatgctaaaaactctcaataaattaggtattgatgggacctatctcaaaataataagagctatctatgacaaacccacagccaatatcatactgaatggacaaaacctgggagcattccctttgaaaactggcacaagacagggatgccctctctcaccactcctattcaacatagtgttggaagttctggttagggcaatcaggcaggagaaggaaataaagggtattcaattaggaaaagaggaagtcaaattgtccctgtttgcagatgacatgattgtatatctagaaaactccatcgtctcagcgcaaaatctccttaagctgataagcagcttcagcaaagtctcaggatacaaaatcaatgtgcaaaaatcacaggcattcttatacaccaataacagacaaacggagagccaaatcatgagtgaacttccattcacaattgcttcaaaggaataaaatacctaagaatccaacttacaagggatgtgaaggacctcttcaaggagaactacaaaccactgctcaacgaaataaaagaagatacaaacaaatgcaagaacattccatgcttatgggtaggaagaatcaatatcatgaaaatggccatactgcccaaggtaatttatagattcaatgctatccccatcaagctaccaatgactttcttcacagaattggaaaaaactactttaaagttcatatggaaccaaaaaagagcccgcattgccaagtcaatcataagccaaaagaacaaagctggaggcatcatgctacctgacttcaaactatactacaaggccacagtaacgaaaacagcatggtactggtaccaaaacagagatatagaccaatggaacagaacagagccctcagaaataatgccatgtatctacaactgtctgatctttgacaaacctgagaaaaacaagaaatggggaaaggattccctatttaataaatggtgctgggaaaactggctagccatatgtagaaagctgaaactggatcccttccttacaccttatacaaaaattaattcaagatggattaaagacttaaatgttagatcgaaaaccataaaaaccctagaagaaaacctaggcaataccattcaggacataggcatgggcaaggacttcatgtctaaaacaccaaaagcaatggcaacaaaagccaaaattgacaaatgggatctaattaaactaaagagcttctgcacagcaaaagagaaactaccatcagagtgaacaggcaacctacagaatgggagaaaatctttgcaatctactcatttgacaaagggctaatatccagaatctacaatgaactcaaacaaatttacaagaaaaaaacaaacaacaccatcaacaaatgggcgaaggatatgaacagacacttctcaaaagaagacatttatgcagccaacagacacatgaaaaaatgctcatcatcactggtcatcagagaaatgcaaatcaaaaccacaatgagataccatctcacaccagttagaatggtgattattcagaagtcagggaaaaacaggtgctggagaggatgtggagaaataggaagacttttacactgttggtgggactgtaaactagttcaaccattgtggaattcagtgtggcgattcctcagggatctaaaactagaaataccatttgacccagccatcccattactgggtatatacccaaaggattataaatcatgctgctataaagacacatgcacacgtatgtttattgcagcactattcacaatagcaaagacttggaaccaacccaaatgtccaacaatgatctggattaagaaaatgtggcacatatataccatggaatactatgcagccataaaaaaggatgagttcatgtcctttgtaaggacatggatgaaactggaaaccatcattctgagcgaactatcgcaaggacaaaaaaccaaacaccacatgttctcactcataggtgggagttgaacaatgagaacacgtggacacaggaaggggaacatcacacaccggggccttttgtgtggttggggaggggggagggatgcattaggagatacacctaatgtaaatgacgagttaatgggtgcagcacaccaacatggcacatgtatgcatatgtaacaaacctgcccattgtgcacatgtaccctaaaacttaaagtacaataaaaataaataaataaataaataaataaatactagtttggctgcattgctttgattttcttctttaggggcctgttcatacatacaaaggataccatttacctgtcttctatatgactttctcttaaatcctttcattcttttgttttaatttttatcttcacatcctttatttctgtcactgtgctgtccatagagtttgtctgctgtgtgtccttataattaagtctatgttctgaatgtttttccttttttagaaattcagttctaaagtgtttaatttctcgtatttttttttctgttgcctcaccatatcatttctgagttttctgtttctgaaatgtgcaactaactctttcaaagcattgaccagattcttcagtctttttaattcattctgaaataactgggctacagtttcatctgctttgtggacagaagtgccacaaagagccgaattgtcagtgcagacccacatgaatcatagatcttaacgaagtttttactaacgactagcaaaggatacaagctaaaaatgggtacaagcaaacacagcatcattcatcactgtaaagactctgaactatcacatggaacttcaaaaggattcttcttctttgctgcaatgtgttttgatttttggagtgatagatgtttgctaactacgcacgtgacaaaaatttgcttagaggaagccatgttagttttgatgctactcaactttgtattttgttagtcatgagatagaaagcctgtgagattacgtgcccttcttttagcagctgcatcccataaaactaaaaattccagttttgtttaaaccatgaacaatttagtcagacttaatatatcctatttaaaacattcttagataagaacttcctttgttattttgctaatatacaatcccaccaaatgtctacaagaagggctagttaatcaatataccaaagatcaaatctatttatatgaaccacaaatacaaaacataattatacatatataattttatataatttaatttataattatatacattttatagcagcaatcaaaactatcatgtattttgggatgaatttaataaagaaatagcaggagctctgtagaaacaagtatgaacttctattggaagacagtaatatcataaaacattaaaaagaaagctataccatgtttatggttaggaagattcattattgaaaatacatcaattcttgataaattggtctataaattcagtgcgtgtccaatcaatatatttagctcatttaaaatgtatatggaaaaggctaagtaccaaagataatcaaatgctcttcgaagatgaaaattaaagttgagagatggggtaaaaaactataattcagttctaaagtcataaagctataataattaatacagtatggcattggcatagaaataagcacattgactaaataaatagaaaatacagttcagaaaccaacctctacatttatgaaaaactgacctatatcagaacgagcattgagactacaggagaacagaggaactagtaagttaatggtcctgacacaattgatatctacatagaaaaaaaaacttaatccttctttactctatgtaaaaacaataattccagatgaatgtaggacttaatggagagccaaaactaaaacttttataggaaaacatagaaaaatacctatctcagggtcgggaattaggtcttcaacatggcaccaaaagtactaaccataaaagaaacattaataaagtcaacctttttaaaatcaacaactttaattaaaaaaccagggccaggcgcggtggctcacgcctgtaatcccaggaggccgatcacgaggtcaggagatcgagaccagcctggccaacatggcaaaaccccgtctctactaaaaatataaaaattagctgggcgtggtggcgggtgcctgtagtcccagctacttgggaggctgaggcaggagaatggtgtgaacctgggaggcggagcttgcagtgagctgaaatcgtgccactgcactccagcctgggcaacagtgtgagactccatctcaaaaaacaaaaacaaaaacaaaatcaaaacaaaaaacaaaacacaggttgctggaaaaatggttacttatttttattatgctttataaaatatacagttatattatcaaacttcttttgtaagaatcaaatattatgctgagaatatggcaagaaaaaagaaaacaacctccaccactcataatggcattccctttacccaccatcaactaagtcaggaacctgcgtcactttcaagttttctgaaatgtggactgaaaatacttgtggagggccctcacagatgcatttagaaatggtatgttctggaaaatggaactgaaatgttttagcgagagtcatgggcccaaaccttgaaatagaggttggtggagttttctatagtatgtaattacaacacaataagactcaaaagcatttcaataaagtgtgggtggaagacaagatactgcttcaagggcttcattagctttctgcagactggagctctccaaggcatggggaggaaccctgtttacctttggttcagaatcagttttaaccatcattgagggctaggtcagagtgcagcattaagtccttgggaatacactgggtggggaaagaaaagagagcaatgtttttctaaaagcccagaaatgggcttactgtgtttaccagttgtttccaggataatgtattgcagcgccaattgctgatgagatggtaggattatacttcagtccctgctttacatttatttcttaaagaagcttctggtaaattagagcaatagcatcggcttagtttagtgttgttctgttggactaaggatatcagttctatccgtatgggcgggcctaaagcctgggaaatatttaatgaagggagagagggggagagagtgagcatgcaaaagagagagagaaaaacaaataacaaaacaaaaaccaagacatttccctttatagtaagaatgatgaggaaaacatgtttagccatacaagatatcaagataatctcttatttctttcttgaaaatgcaagtacaaatgcctgcaaagataaaatatcctctggatggagtggaaaggttcaccaggcctctgaaatcacgtgaatgatgttgcgctttgctgttaatgaagctcggtgcatttttcatttcagtttctactaagcatttatgagctattacccttcccttccctaaactgcgttgttttttaaaaagccttagaggcattccttctagaaaataaaggtaagtgttaagtggtgataatttggtaataggtgtcatgcttgtggttcataatgtgttaccctacacattttctcaattatccctagaacagctttttgaggatatgaagttagaccttacaaagcacatctttctgctggaaaaatgaggtttatagtggttaagtttagttgcttatgatcacaaggctagagagtggctggaatcaagactcttcaccctgatttcagtgctttttcactccaccattaatatttattgttgataaataatatcaacactttcctaggtgtattagggtcatctagagggacaggactaataggatagatgtatatatgaaaaggagtttattaaggagtattgactcacaccatcacaaggtgacgtcccacaataggccatctgcaagctgaggggcaaggaagccaatctgagtcccaaaacctcaaaaatagggaagctgacagtgcagccttcagtctgtggccaaaggcccaagagcccctggcaaaccactagtgtaggtccaagagtccaaaagctaaaggattggagtccaatgtttgagggcaggaagcatccgtcatgagagaaagatggaagccagaagacagccagtctagtccttccacgttcctctgcctgcttttatcctagccacgctggcatgatgatgacatggtgcccgcccagattgaggatgggtctccatcttccagttcactgacacaaatgttaatcttctttggtaataccctcacagacacacccaaggacagcactttgcatccttcaatacaatcaagttggcactcagtaataaccatcacaagtccacaccttgtcaacttgatcccacatacatctccttaaatcatacataatctccaaatacagacaataatgtcataattacaccgaacataatacaactatcgttcatacaaccagaaatgcaccaattcccaaaccaaatgttattacataaagttaacaacacttaaatgctgatatgaagtcaataaatactttttttttttaaaagatggagtcttgctttgttgcccaggctggaatgcagtggtgcgatattggctcactgcaacctccgcctcctgggttcaagcaattctctgcctcagcctcccgagtagctgggattacaggcacccaccgccacacctggataatttttgtatttttagtaaagacggggttttgccatcttggccaggctggtcttgaactcctgacctcgtgatccacccacctcggcctcccaaagtggtggatcccaaagtgatccacccaccttgacctcccaggttgtaagccactaaatcttatgtcacatgatacaggaaaaagaaaggaagtaaaatgaagatattgtcttagtacaagtgtatacatgcagaaagatgttcttaacaaaataaggaggaaatactcatgacaattacagtaacctggttgctgcaactcatcacatggtcgtagctgttattgatgactaccttcttctacaacccattctgttttccctttgcctctagcaagtacctcagcaggtcatggttctttacctggtggagtgtcccaaaccttcattcctgaagggtctgggccatttgtagtcctgcctggatcgagttgttgtcattttttattgaccttaatcacagggcatggtaatactaagagacaccctaaggaatttcctgtattccacacatattcttccttaccttcattatggagtagcagactgagttcatcttgataggctaagtcagtcaccccagccaacactaactcctttcttagcctgttgacttagaggtaggaggagcccgagattgcaatcttaatttccagtttaatgaaatcattattgtgtctcctggcggcaacattcatcgccctggaactgagacttctaggccagcagaacgtaatgctgtggaacaagaagcaaaaattttactagcgggtctctaggggtgatggtgagtggtgccacttccatttccaccccttgattcctggacccatgaatcctggctatgggagaaacagtaccaaatactggacactgatccggagcctacacagccttctcgaaaactttgccccagccctgcaaagtattgtcgcctagttggcattgtaattgtgacttcaaaaggccattccaccgttctatcaatccggctgcttcaggatgatggggaacagggtaagaccagtgaattccataagcatgagcccactgctgcacttctttagccataaagtgagtgccttgttcagaggcaatgctgtgtggaatgccatgacagtgggtaaagcattccataagtccatggatggtagtcttggcggaagcattgcctgcaggataggcaaacccatatctagagtaagtgcccattccagtgaagacaaaccactgttctttctgtgatggaagaggttcagtataatcaacctgccaccaagtagctggctgatcaccccgaggaatggtgccatatcgcggcctcagtgtttgtctctgctgctggcaaattgggcactcagttgtggctgtagccaggtcagccttggtacgtggaagtccatgttgctgagcccgtgcgtaacctccatccctgccaccacagccactttgttcatgggcctattgggcgatgacaatggtggctggggaaagaggctgagtggtatccacagaacgagtcatccaatccacttgattattaaaatcctcctctgctgaggtcatcttttggtgagcactcacatgagatacaaatatcttcacagtttttgaccactcagagaggtccatccatccacatacctcttccccaaatttcattgtcatcagttttccaatcatgcttctttcaagtccctgaccatccagccaaaccattggctacctcccatgaatcagtatatagtcacacatcttgccatttctccttctaagcaaagtgcacagccaggggcactgctcaaagttctgcgcattgggaagatttcccttcactgctgcccttcagggatgtcctagaaaggggctgtagtgctgcagctgtccacttttgggtggtgactgcatcatgcagagccatctgtaaaccaggcccttgtcttctcttcctctgtcagcttatcatagggaactccccatgaggccatcagtgcaggctgggggagagaaggcagggtggcaggagtggggaccatgggcatttgagctacttcctcatgtaaagtacttgttccctcaggacttgcttgagcctgatcatgtatataccacttccatttgatgatggaatgctgctgtgcacaacccactttatggctagatgggtcaaaaagcatctagttcatgataggcaatttaggtagcttggtgatttgatgacctgtagtcaaacatacagtttctaccaaagcacagtaacaggccaagagttgtctctcacaaggagagtagttatctgcaggagatgcagggccttgctccaaattcctagaggcctcccctgtgattgacctataggggcctgccaaaggctccaaacaacatccctatctgccattgacacttcaagcaccattggatctgccaggtcatatggcccaagtggcagagcagcttgccaagcattctggacctgttgcagagccttctcttctggatcccactcaaaactggaagcctttcaggtcacttgataaatgggctggagtaacacacctaaatgaggaatgtgttgcctccaaaatccaaataggcccgctaggcattgtgcctctttcttagttgtaggaggggccaaaggcagcaacttatccttcatcttagaaggaatatcttgacagaccccacaccactggacccctagaagttttactgaggtagaagttccctaaattttagtcaattttatttcccaacctctggcacacaaatgtctcaccaataaatccagtatgtttgctacttcttgctcattggatccaatcagcataatgtcatgaatataatggaccagtgtgatatcttgtggaagagaaaaactatcaagatctctccaacaagattatgacacaaagctggagaatcgatatacccctgaggtaggacagtaaaggtatattgctggccttgccagctgaaggcaaattgcttctgctgggccttatggacaggaatggagaaaaagccatttgccaaatcaatggttgcataccaggtaccaggagatgtgttaatttgctcaagtaatgaacccatatctggtccagcagctgcaattggagtcaccgcttagttaagcttacaataatccactgtcattttacaagatccatctgtcttctgcacaggccaaacaggaaagttgaacggggatgtggtgggaatcaccacccctgcatctttgaagtccttgatggtggcactaacttcctccagggaggcaatgttgtgtttgatttactatttttctaggtagaggcagctgtaatggcttccatttggcctttcccaccataatagccctcaccctaccagtcagggagccaatgtgggggttctgccagctgctaaatatgtctatgccaattatgcattctggcactagggaaatgaccacaggatgagtctgggacccaccagccccactgtaagttggacctgagctaaaattccattaattaactgatctccaaaagcccctactttaactggaggaccacgtgatgttttgggtcccctggaatcaacgtcagctcagagccagtgtccagttgtccctgaaatgtctgattatttccctttccccagtgcacagttaccctggtaaaaggccagaggtctcctgggggaaggatgggagaaagagtcactgcataaattgtcagcaatgtagtggggtccttcctcaaggggacccagcctccccttcattcaaggggttctgggtctataaactggttcaagtctgcaaattgattgaggggccgtgattctttgtataatttttaatttaaattagtcttttgtctacttgacctggaagttttctgcttatataaattaagcaagaatgcagtaggcttcttgtcaatttcactttttaggaacactgagattaagtagccaatgccagagctctacacaagtcagactattctgattgttgccttgcctccgctgacctttacggtaattgcacccaccttgccttgatgcttgagtgccaccacttcgcccatgccacctcaggatccaattattaccattgtatttaaattttgtagttgaatgactgtggttcccactataatatctagcatgcagagaagagcaatcacagagctcttcaaggatgcagctgctgccctcacaaatctatttcacaatgtgctggtcaaaggtatatcttctgtactctcccagctgggatgagtaggactaaagtgacgaattcactccaccatcccaatctccataagcctttggatcccttcctctacattaaaccaagggagatcaggcatttccagctcactcacagtgggccaccttttgatctatatttcagctaaccaagcaaataaactattagaaccttttttaactctccaagctgcaacattaaatgcagaattcctgcttagtgggcccaaatcaatcaattcagcctgatccaactttatgttccttctaccattagcccacacccttaatatccattcccatgcctgttctccagatttctgcttatataaattagaaaactcaagcagttcttttggagtgtagcgcacctccttgtgggtcacattctgaacctcatctctaaggggcctgccgggactttagtctagttctataactataagcaaacaggggtattgagggtgggtccttaggagaatcaacatcgtctttcctggcaactgcctcaagggaggtcatcgctgatgccttaggcagtgcagggttaaactcctcagacaaaggtgaaaagcctgatggcagcgcaggtggaggaggggatgttgcctcccctctgttgcctgtttcctctggtaaaaaagattcatcagaatttagaagctcagtgcccccagccttatcagggtcctcccgcatggccccattccaagttgcagggtaccattctttttcaatcaatgctgtcactttaacagtaaacacctggcaaggctgtgcacgtacctttcgttgcaggtcagccactcacatgataagagcttgtgtctgattttccgcaatttcagctctttctctacaggagataagactcgaacccagggcaatcttagaagatttgaggctcagaatgtggttctggagctgggagatagaatccctgagttcatcatttttttgttttcatcactttgattagtgaacttaggagcaaccaactagcttcattatattccttggttctccacatatggtcaaaggtattaggtataaagtcactaaactccttgcctctcatgagcagtgaatcaggagtatcagatgcatttattttgcacaactctctacacagttcacagcaaggactatcagtgttctccacactattagaagtagagtccctagcattttggcgtctaatcatatttagcagccaactccagaaaccccaaaaccatctaaagaaatccatccttaaaattctgttcctctagaaccactcctggtaccaaaatctgtattagtcaggattctctagagggacaggactcacaggtgagatgtatatataaaaggcagtttattaaggagaattgactcacacaatcacaaggtgaagtcccacaatagtctgcaagctgaggagcaaggaagccagtccaagtcccaaaacctcaaaactagggaagccgacagtgcggccttcagtctggctgacagcctgagggcccctggcaaaccactggtgtaggtttaagagttcaaaagctgaagaacttgtagtccaatgttcgaggccaggaagcatccagcacaggagaaagatggaagccggaagacttagccagtctagtccttccatgttcctctgcctgtttttgtcctagccatgctggcagctgattagatggtgcccacccagattgaggatgggtctccatcttccagtccactgactcaaatgttaatctcctttgacaacaccctcacagactcactcaggaacaatactttgcatccttcaattcaatcacattgacactcagtattaaccatcaccctaggctttagggatatagggaaaaacatgactcattgctgttatctgagagtacataatctattggaagaaaggaaaacagttacatgtaaggcttatatcagtataaattagataactgccaagtgagagaggtagaggtagcaagtgctgtctgtgggtgcatgttaactcagtcttaatcttggaagaagtggcagtgtggaatggtacatggagaagcagaagggacaattactgtgagcagatgaatggctcactacaggggcatgggaagaagatgcaagagcagtggaatctttaattgacgaacctggtaccaagctgccaagtcttagtctcaggactggcaccgtgcacttggccattgaaaagactttggaacctgtggagtgaagagttgtaggaattttcaaagcctcagtgtaggaacaatgtgagaatcaaccagggcatggtactccacactgtgttcagatccactggtgttaggggagtcccagagaggcctcttagagggttgaggaggatgggatcaggcatagcagagactagggacacgaggctctgcggccagactgcaggtctgctaccaactacagtgtgattttgcctagtcacataatctctgtgggcctcagttttttgttttttgtttttttctattacaacagtacctttctcgtggagttgtagtgattagatatctagtaccaagactatgcttgttagcactgagtaagaactcaatgaaggttagctttcattggtactatattactattgttagtgttggtggtggagctgaatcgcctaacctatgaggttggtgctgaaatgaagaaaagaataacagtgttttaagaagtttggtcactagaagtggagcttagtaattaaagaaaaagagtgaacacttttaccttcttgtggaagttagtaagtctacaaaatgttaattctgcatttgaatgatcatttgggagactcttattgtcctatttgcactgaaaaagtcactgaatcattattttagaactggaataacgcctgagatctaggccagcactttgcaagttgtgctctatgggacttttcatggaagtggctgaggagttgccttgaaggaaggcagagggagtgggtcttgggacacccttccagttataaaacaggacgttgattctgttttgtagttgcagcatcacatataatttcatttattaagaggatcccacttctaaaaataagttgaaaaccagtgatttaatccagcctctctgtttgcatatgaggaaatggaattccggaaaggttaggtgatttgtccaaggttgcagactagactatttattaatagagtagggtcaggaacaaaagcctgctccttgctggtccagcgcctgttactagttacataatgaatgctacctattgctgcacagtgccaaatcattgcacttttcagattttactctaatcaaaagaaaaaaattaaagtgcacttccaaatcagtacttatatgcaagagcttcaagaaacaaactagtatttaacttggtggttacatattgactgtattttcattgagtgaggttagaagagattgagaagcgtgaaatgaagttacaaagtagaaactatatggtgaactcaaggcaaagattgtccatagtaaaagaagacaaaataagaatgaaagagacaaaagaattgccaatgagttgtaatcttaaaagaaagatatatttaataaaataggattgattgttttgaatgtgggctgagaagtcctgccatcttccattgactctgctcacaggccttgtttgtgaactggcttccatggatagcattactctcctgacagctgcagctccaaattcagcatgaaaaggctggcaattctaagaggaagggagtgtttaggccacttttaattctactttgtcattgcaagtttcttgcattgtttggcatttgttggtcttccttactggatttcaaaactagaacactttttcctagccttggaaccaaccacgaaaataaccacctcttaccctcatgaagaacactttaaatttttctcttttaaaaatgaagtctggaatatctccaaacatcttgtcactcacgccttcatttaaatgtcaccctctcaaccacaaggaaactaaaattgccccctacttgctactccctgttttattttctagtagaacatactacagttggagatcatctcatccatgtcttttattcttgtctcttatttgcctctgcttgactgtaagctcatggaaagtaagggaccttcaccaactagcaaagtgcttaggacctagtaagaacctggtcaattctaactgagtgaatgactgaattcctgtgagaagtcaacatgaaaattcctaggtcattagtttagttattggaactccaacactgtattggaaaagtgtcatggaaaggatagttagtggattaaggttttttataagaggaagagggaaagaaaggcattgtctttacttcaggcatttcaatggccatgatggagcctaaatattgtatgttgcattttgttttggttttgtgtgcacaagagctttgacagtggaatgaacgggttaagaaatgtgagttttcttttcgtcctgctatagagacttaaggaattgccccgtgtgagttccttgagggcagagaaaaatacaaatccatgaatacctgaaagccctgatttggcccctaagcaatctatgcatgtaacaacattgcatttgtaccctgtacatttataaacattttaagaaaagtataagagaaacacaaattttggttactcctctctgaaaactgctctgatgtcgcttggccgggggaattaagacctcttcctgtggcctgtggccactatgtgctcccggctctccaggctcatccagggccactgtgcctggggtcacagggttccaggatgtcaaccttctttcagcttctctgactcctcaagcatttttttttttttttttttttttttttggcttccaagacccaaacgcatgtctctcttcttggcacactcttcccaacttttttcctggctaattgctagttatttagtttgagattaaatgtcactccctcggcctggcgcggtggctcacgcctgtaatcccagcactttcggacgccgaggcaggtggatcacgaggtcaagagatcgagaccatcctggccaacatggtgaaaccccgtctctattaaaaatacaaaaaaatttagccaggcgtggtggcatgtgcctgaagtcccagttactcgggaggctgaggcaggggaattgcttgaggaggatattgcagtgagctggatcgcacctctgcactccagcctggagacaaagtgtgacaccatctcaaaaaaaaaaaaaaaaaaaaaagtcactcactcacagagggcttctcagatactcccctgccccctcatttaagttgcaccgcttgttgtattctcttataagccccattctttttcttcttggcattgatcaaattaacagctttattttattttagcattgtgagtgtatatgtgtgtttaatgtctgcttcctgactaaactgtaccctgcaggaaggcaaaactgtgtctgtgttgctcattgttaaaccttcagcactgaactcagtgcctcgaacataggagattccaactcaatatttactgcgtgaaggaatgaatgaatctttatgtccctcgtgcctaacataaagtctgccatatacaatggactaaaaaatagtattcagctaaaactgagttacggagaagatgaagtattaattgtattttttacagagaaacaatggtcagtgtatcaaaaatagagaccctgctctcagatatataacatagaactctcttcattcatttgccttcattttagttaacagaatctgttcatctaagtagagcagagaaaaacttcataattgctgtgtctgtgttattccaaaacatttaaacaaaaggtgaataactgaggtattcttccctgtggtacatacttgatgtgggcattttaaaagattgatcaaatctcctttcagctggatatttgagtaggcacaaccattacagaattttcctctagggacttactttagctcttaaactatgtaaactgaacaagcaaactcaagtggatcattatctatagaagtatagaattccatctccctttggcaaaccattcaaacccagaagtgtgttttacacattctgacagaagcatctgtaataaccaactctaacctcctttcttaccactttagcacccaaaagtataagaaaagaggacatgttaaggcttgttctatttattagaaaatatataaagagttcttggcttaagaactcttctggctatcagctccctgatgtgaaaaaagtaaatagcaaggggtagcatggagtcttactcccgtgtgacagacagcttaagaaagacaattggacatcatgtgactacatgattcaagctaaagtccagacacatcttttccataggccaattgaacattttctctgtaatttccacaataaccatttgcaccagcatgaatggagagggtctgagttcttctgggtgagtaaagggtgtgtcagttatctgtcctctgtcaccaggatttagaggcaggctcatagtgactcttgtaaagttgaggttcgcctgtggaggctgcaaaaaagagggaggaagagagagtgaggttcctcttggctctgtgccagggatgtgattagaggaccctgggagggccttcatcctacgaggggttggaagtggaaatggatgtgtgtggatgacctggtaacgtgtcacagccccttccaccccatagtagtcagggatttaatgcctcaacaaggcaggtctctgaaggagactgacttttctctctctctctgaatgatactgcctgagagaaatactcacttcctgctttgttttcaacaagtatggacttccttacacaaaaagaatcttttttgcttttgtccccccatttcactggaaatctatccactgggcaccactgttggttggcttcctttcatagattcctttatgtttcaaattttaaaaagacaataatagcaacaaagtgaaatatggatttaagctaggaaaagcagagaactgaaacttttttcctgcaatcatacttcccagcttcttcagcaagatctgcttggctgggaacatgccttctgagaactttacatttctaaactgctgctaaattgctccatgcatttattcctcaaactctcagggaagatagcactggctttcagtctcataccaaccattcttaaggtaatggaccaaaagtcatttccacttgaaatataatccttctaaatgaatcatgcaacatggtttttacctccattttttcagaataactctaagatgatgatcctctggccatattttaaaaatttctcttatttgttttaattttcttccattttttctttaattttgtatccagacactgccttctctaagaggaatgacatttttgcgggttatcatgatatatttttagcccatttgccttgacccatagcttacaacagttaaagaacactaacatataaacatagagttttgcccaaggccattagctttgcatgttaacaagtgggcagaaggaaggctgggcatgagagagacatgctgtccttctggtgagatcatcaatcccattcttgtaaccttcagatcattgcatttgttcagaatcgtctgcagaggaaaacatctcaaagttgggaggttgttgaagagtcagaaacaaatgggtcctgggtaatttttcaaaacaggctttttgtcaattgtcagtcagctgtttaatattgtcaattgtcactcagctgtttaatattgtgctttgttataaggataggcactgtggtctcagcgttcttaagcttttacatttccgttatttggttttacttctgcattagtagagtagatgtagagtagatgccacctctaggaactctaccagcagcagcatcttagactagaagctccctctctaggactataatctctgtagcctccacttctcccaccccttatttcttctgagcctacttggtctttgatacttactataatactttctattctcttatcataaacagttttctgatttcattttcctctggtttcatactaagccccataatcagtcactgcaagattaccttctagaatttctgtgccctcaagttttctccatatctagagagtcagtcatctgccttgagccacatccactgtctactttcttcacttccatccccaggctgcccagcactgatgaaaacaaaacaaaaacaaacaagcaaacaaaaacaaaaacaaaaaactgactaggatctcaatctggtttgcaaatccatgcttctctttcttgacttctttagacatcaacagaattgacgcctcctcttgacctgggacacccctcctccttggtgctttcttctacctccccctgcttctctgtatgtcttttgcaggctcatctttctcttaggctgtcttcccccatctctcctctccctctgtgcactcaggcagtctcccttgtcaacccccaaaactgcttctccagaccccagtgtttctctgagctccaggtccacaattctctaaggtccatgtggatgtccctcaccatttcaaacttctcttccacagggagtccctggttttcactaccatagcatattaaaataccatgcatttcccttcataccactaattacaactttgtttcttttttttaaattttatgttttaaaaattatcttctgcccacatatattgtaagctccttttgagaaagacacattgctgtcctggtcattactatattcttatcaactagcaggggccgtggtcggggcttgtgttagtccattttgtgctgctataaaggaatacctgatgccaggtaatttataaagaaaataggttttatttggctgagggttttgcaaactgtacaagaagcatggcgccagcatctacttctggtgaggcctgaagcagcttttactcatggtggaaggcaaagagagagcaggcgtttcacacagcaaaggagagagcaagagagatgccaggctccttaaacgacctgctctcccataaactgaaagagcaagaactcactcattacggtaggatggcaccaaaacagttgtgagggatccaccccgaacacctcccaccatgccccacctccaacactgggatcaaatttcaatgtgagatttggagggaacacacatctaccctttatcagtgctcaataagctcgctgaatgtagaacagtgatataaggcaggggtgggccaagtataggcgacaggacaaatttggcctgctactgcttttgtaaataaagttttatttatttacaaaataaataaataaatacagtcataatcattggttacattttgttcaaagctgcttttgcattaaaacatcagagttgagtagctgccacagagactgtaatggccccacaaagcctaaaatagttaccccgtggtcttttacagaaaaagtctgatataaaggacagtctcacagcacagaggaaaagcatataacccaaaggaggaaagagtagagcatagtggactgcagagaagtttccctggacccaatctgtgccttgaaagatgagaaggacacctccaaaggcaggatgggggtgaggtggggtgggcggtggtgatccaagcagacagcacgggcaagtgttctggaaaacttgcctttgttcacaagtatcctgcagtataaattgcaaggtgggcagtaagaaatggacttgaagagattgaacaagggccagaaacccaaggacattgctaaggagtttgtgccttagcccatccagggccctagcagccttgactgatgcttctgaggtcctggaggctccaggctcaggctaccttcccatattctctgaaaataatatcacatttgtttagtaaaaaaattgtttactaaaaaattaacctctcagaatttctgcattcacatttatttcttctcatatcctcgagttagaaaaaggtatttctctcctgtgatgatattgattctgcactcatctattttcattactgtctccttccctccctccctcagtccctcccttagtctatctcactctaccatcttttcctttggaccttctgacattcaacatcttggtcgctcctatccagccacacctctgaccattcaaccatttgtcctcttgattggttccaccttgtcctatcacgctggatatgctgttgctcccaaattgcctccctctgccagtttctcgccccttcctccttctgtctctccctctctctttcaatctttctctccctcagtctctctttctctttccctctctctcaatctttctcttcctcagtctctctcccattctctttctctttctctcaatctctctcttcctctctctcttatcctctctttctctcaatccctctctccctctttctctctctcaatctgtttctctgttaatctctctttctctctccttctttctgtctctgtctctgtctgcctctctctctctctctctcttccctagtgagctcacttgctttcccagtttcagtgatttctattcagatatctccaaaatttgtatttccggatattttatgctttcatggaggccgtgtaaattggtataacctttttggaaggcgttttggcaatacttagtaaaaggttaaatgtttacaccccttgattctgctattgtatgtgtaaggattttttcctgcatacttttgtaagtgtagaaaatatatgtataggaataattgcacattgtttgttgtagctgaaaattacaaataatataaatgcctataatcagagcagttaaatacatatgaacacagtgaaataccaggcactcatttaaaagatgaggtatattttaacaagcctatttgaaaagatacccaatcttagcaagtgaaaaaaaaactcatcaaattgatatatttagcgctgtccctctctcaagtttcagacccacattttcaattttctgttgtcatcttgacttagtctcgtgaaattttaaactaatcatttttaagggaagatattttcttcccttaaagatgaaattcagacaaacctctgaatttccctctttctgctaatttcttgctttcttttatcatctttccatccatcctaacatacagttccagaggagtctttaaatccttccttattgcctaacaccgaggatcatttgctgaaatcttgttgatttttccctcagatcaacaaaggattttcagaatagccctgatttctctttatcaccacggtgctgtctcacgtcttctctccccctcctcctacctgccgtctcttccagactcgtctctctcccccaatctcctttgcgcactgatgccaaattagtcacaacaaaagtgtttacgtgatcgtgtcacccactggtaagctcttaatggtcttcccttacacattatctcccatttcatctcaggagccttttattaaccactcttcacagtctgactcagccctctttgccagtttctctctttacaaatagcaaagtctatgagctagattactcaatattccctgaataggtcttctcttctcccacctcttggcctttccagtaccattcaatcttcctggaaattcctgaaatttctttcctcctcactcagtcaatgttttgagacccacatcaaatgctacatactatttgttcctttactgatcatgccagttggaaatgattcgaatctgtaaagcagggtgctatggaatgacatttcttatagccctttggtcatttgggagcaatgtctaacataatatcctccaggtccatccatgttgttgcaagcgacaggatttccttcttgttaaagggtgagtagcattccattctacatatattccatattttatttttttttgctcatctgttgatggtcacccaggttgattccatatcttggctattgtgaataatgctacagtgaacttgggagtgcagatatctcttcaacatattgatttcatctcctttggatatatacccagtagtgggattattggatcaaatggtaattatatttctaattttgggcagggtcctctgtagtagctccataatggttgtagtaatttacatatccaaccaagcacgccagggttcacttttcctcatgtcctcgccgacaagcctgatattcttatttgcctcttagcgcttcagcctttccctcgtgacttaacggtgactcccttgagactacttgaaataataagtttggatggcaaggaaatacccttctgctgtcaccctttgccataagactgagttactttgtaaacaaagaagatttacttggtcttccatgcccaagacccttttacttttcatcgcttaatatttcatggccaaaaactgttggttcttccaatcttgtaaggccatttatctttgatcttgctccattcccttccatttttgcttgagaatcattcagttcttgcctgatctcacgtctttctcgcaacaccttactaatgactgccagagtgtccactacacactatcggtctcatttgaccacttccccaggcatgtagcctacctgccaagttctttcacagcagatattttgcagtgttgtaagagggctccctagcttgctatgttttcttactacctggcattaggaagtaaacatttttcatggcagtattcacttctagtaccaatttcttttttaatctacatgggctaactgctgtatcaaacagccatcaaatcccaatgttaattgcaacttacagtacgttgtgatgtttctgtctgtatactcattcagacacacagagtttaagtaatttgttcaagatcacaaagttagtaaatggtggcatcaagatttgaacccaggcagctggactcaagagtctaaacaactttcattttaaaattttcatctttcaagatatatcacttacaatttccatcttcatcactttcttccatacttcagagctgcatatgtaaacctcttgatcatataaatatttatggagtctcagcattttgagcacatgctgagagattttgtagcattgaagataaagaagctctttcaatacatctaatcttgccactattgattttgaacagcatcttaatttgttacctttttaaaaccatattgtacttttcttcaggacagctaaattaaatgtcttatgttgatcccctgggttttctcagtttccatttatcagtttccttttatataaagagatgctaatgggtaaccttacattttgtaaggcatatttttgaagatatacaagtgaaggtttgatctgtacaccctcgttagagctctttattttacatgtggaggaagagatgccttagggcttctgaaaaacaggcttttatttttatagaggagaaacttccagaacatgccatgagcaaatgctctgtcaagtctggttctttcccccattacttaagtgcaaatggaccacatttgaagaagataagtagcagaacaaggctccccacaaggggattttgaggtgctctgaaaaccagactgacataatccatggaggagttcatcactgcaggctgtcacgtctcacagtgggagtcataggctggtctgcttgataaactactcctgatctatgactggagctgtgtgcttcctttaaaaataaatcttgtttttccatgccccacgtgcttctcagcctcaggagcacctcatggatttagactaatcttgtcttttacagtcatgttacttccagattcctaggaatcaccccatttctgatgccgttgatccatccatacccactgaaattgagctaaatgctctagtctgatttgccccttgaagttagtatagaatattttggctagactttgaaaatgaagccctgaccacaatgcataatgacctcagtagacactgaagagttcctttgcatcaggcaagtgacaagtatctatctcatcttcaaagtccacatagatatgtgccagattgtaggttgacaaatcactttttcactagctcacgtggcaagccttttcaccttgtaataatgctagtgagagacccataggtaccacataattggccagtcattgagattcaagcaacatttggataatttagcaaaactatcatcagaatcatcaaagtacataatttttatttattatgcaaatagtggattcactaaagtgcttagaccaattaagttgctcccattgaaaaacagggtgattttattcttaagaatatatcaggataaacttcttgtagcctctaaacagtactgcttagaaaagtgcagcttcactgcattgcatatccccccagaagccctcaaagttcagatgtacaccacaaaaacatgaagcacatgtgtttgcatggaaggtaggctctggggtcttcctatcataatatgtctatgattaatagtcaacatatgccccctccacattccctaaaggaacatacacatgcatacacacacacacacacacacacacacacacacacacgtgagaactgaattgagagtttggggtatacaccatccctgagggcacagtctacagctcctaatgtgtgctgtagagcaagcattatattgttgacaggtaataattcctggttaggaataacaggataccagtgagaagaggctgagaaaaatacactcttgctggaagagtcaagaacgagctcttcgtgggaaactatgggagacgattgaaaaaggacaagaagaaaggagaattgttaagtctccactttctcagtttctgaactgaacttttgctcacagcaggtgaacacaggctccctcccacactgagacttcctcccctgccggtgtgcagtctgttaagtaaacagagacgttatactgagaaaggaacatttctctattttggctatgagttgttatttttaaagattcatcctccaaacattttcccctatccttgtttattttttcactagaaagaagatgaactgcttaaaaaaaaaattcaactccatgacaagaaaaacccacttctagtatgttctccccactcaatgccaatggagcctttggtgtgagcactctgccagccacacattgggcagcatacctcttgaaattcctgctgtgcttctatagagcttccatgcatccagattttcaaagtcaaagcaaaatgcgcatggcagtttttttctgactccttcaagttaaaaggccaacctctcccttgacatatccatgtatttatcagtatatctataggtaatacttaaaggtgatccttactgtgtgccacactccattctaagcactttacataaaaaacctcatttcactttatttgggaataggatgacaatttcttcaatattgagatgggttgaatctggggagactgatgttagatgcaaaaagctttctttctagaacttttcctgtgtcttgcacctggctttctccctgtcttgttcccattctagatctctttactgacagtgcccatggctttcttcttggtactctagtgttgagcataagaactagtatgtaataggctctcagtaaatcttgttgaatgaattaaagtagagcaagaattaaagacagagaagaagatcttcttgttggagttctttcttttggttgataagcaatgtgatttgacgtaacaatcttgagtcctaatcccctcatttggaaaatggaaataataatgctaatcttagaggtcacttctaagaagtatatgaatatatcagaagtaatcaacatttttaagtcaaagaaaagaacgtctgtgaaaaagaaaactaatgagctagttgaaaaaatattaattggatctttttctcataccttacgccaaaataaatccccaaaaatggttgcacaacattgtgaatatactgaaatccattgaatcacactctttaaatgggcaaatgttatgttatgtgattatctttcaataaaattgttataaaaatgaataaaccccagaagatcaaaaatttaaacataaaagcatggaagtatactagaaggaaatataagataattttatatgttatgttgtatatatttatatgtaaaatttttttatttatttttctttgcttttaaaagcaagacataatgttctagaggaataaatgaaacgttcgataaatttaattctctattaaatgttttgcagaagaaaataccaggaacaacatcagaagaaaaaacaaaaaaccataagaaaaacaattaaaaatacatatgacaaatggcttattactataatatttaaagaactcttaaaaatctatgtgaaaatgacaaataacagaaaaatacgtgcaaaggacaagagcaggcagtttagagaaagcctataccaatatattctcttatcaacagtctattgtacaagctatttgaaagcaatgtttgaactatcaaaatttaaaatacataagcccttttatctagcaattctacttccaagaatttattctatagctatctgtacacatatccaaagacataaacataaggatagtcattgaatgaaatgtttttaacaacaaaatacttgaaagcaaagaaatgtcacccaagaaagaagtgattgaagaaagtttagcattcagttcagtgaagacatattgagctgtcaaaaaaagttgatggagaactccaaggtctattaactaaaaacaaaacaaggtgctaaacaatatgtttagtgttcatattttaattgtttatatatttcacaaatatatatttgtgcatgcagaaaatattttaacttctttctaaccccgtcaaacacatcatgccaaaattcaacttgtgataaagaaaaaaataaatgaattcctttcgtgtgtagtatctcatttaaattcttcaacaacccaataaaaaagatacagacacatgtttttaagtactacatgttatgcacctttggtttgcttatttaatagttgcaactactaatgttaaattcttgatgccaaggttaaaagcctgaacttctaaaaatatcaagatctgacatttttctgttttcacagattaatctgccatctcctgacctccaacacactgctctatgttctttcatgctgctcctcctcccatgtttaggaccctcttccaaggaggcattcacatctctgcttgatgaaaccctacattatcttaaagcgtccactcgaatgccacctacttatataccatctcctgcaataccaatgggctcagcccaaccatagcccatagttattgtagttgttcttgtacttcaaaagcactacaaaacacaaccatcaggacttgttacattatttgaaggctatgagcatcttcagccgaggccctgtttttattcccagaactaccacattgtttagaatatagtagcagatcaatatacgtgtattagataaatcgtttacccagatcttgatcattttcaattacccataggttgaagaactccatatttaacatggcagacttgaggactgaactacctacctcttctaagaagttgaaatgagaatgttttattgatgggaaattatttttttgttttgccttctagaattcaaatgaatgttcatattccatgaagacaatggctgatagttttttgttaaagatttagaaccagtggatttttatgaatgtgaaccctttcatgtcttgtggaagattttctgttttttaatctttttatttatttatttatttttgctatgttttcataggaaccagggaaaatgtgtagagggcatggtggagatcttcgacatgctgctggctacatcatctcggttccgcatgatgaatctgcagggagaggagtttgtgtgcctcaaatctattattttgcttaattctggtgagttgataacacaagataactcaatgctggatgaaatgtttatttgtagttttcaaccagatacgatctacccactccaaaggcataatgtcataaatagaaagaaactactgacacacattttaaaataacctaccaacattgcagattccttataaaggtagaaccatgctagccaaatagacacatgaaaaattgtaatttggcattgaatcaaatggcctttgagctaaaatttttgtatgctttcacagataggatgtttttattcaaatggtacatgtatatagacatatgttagttgatagttatattatgtctgaaaataagtagaccaagtaattctgttaagaaattgtgaccaattccaggctccagatagtaaagaaagagggttatttgagacagaccatgtttctggtcaaaactgactagctaaaaatatagttggcttagagatagaaaaacctgtttctaaaacagaagaatgtggaatgcaataaattgtccagctgaaagaacattttccatttgctctatgaagtctgattctactgccccttcgtatttatttgtttgagaaagcttagctaagagcaacatctgttttttgtttttgtttttgtttttgttttgtttttgttttcaatgtagtgaggctggctgttgtataaagagttactctatgtcaccaagatggaaactatggttcagcctgaattagtgccctgactcctcctagcctcttggtatttggatctaagctctagctctacagcctctgggacctaaagctcacattgggtatcagcggtacagcagctccccttaagctccacctttccccctggctctaaccccactttgtgcctcatccctcattctcacatagaaatcatagctatttcgaatctctgggcctgacttagtttcttatgccattagacatagtctcaaattcctcaatagctgaattgcagcttgtattgatcacatacatagagaatccgcacttccttctctttccacgtgtttttgtctctttctgatgagtgctgatcccttcccgcttcccctaacaattttttacttttcttccccaccactgctaggaacctgtgttgcttaatggaatcagcccttccttctcttttcttgtgtttttgtctctttctgatgaatgccaatcccttcccacctcccatgacaattttccacttctcttccccaccaccactagtaacctgtgttgcctaatggttatcacagtaatcattctcacttatcaactaataaatggaaatctgtactattacactaggcaaggactgaattacagaatgaagtcccatgataaatgatgtgatccacactaaggaagtgattaccactccattcaggtttctgtttccactcacgtgcattgtgcttttcatttcagtcgtttgtcctgtacattgtagggtccagatcccacaatggctctttattggatgagagttctgggagcagtgccactcagctacatggtgccaggtcctgaacctgtgccttctttggtggagggctggcacgtgctgacagctttcatgtgggcaatctgggaacttcagagaaggcaggcctattaagtgttaagactccccaccccgaacttttactgagaaaaagtaccccagacaggaagtaaaattagccagagttgtatgatccacacagtggatgctctgatctcagtaataaaaaatatttcctccagatccatatagacttttcctgcattattgttttgtttctgttcctatggcagagtgagtttttaaaactattatgcaagaaatatcaggatttttgccaccaaaaagttggattcatagacccagggtttttacaacccagggggaaaaaactttcagccctcacaagaaagtattttattaaagactggcacccaaacctcaagactatatttctcactgcaggatttggcccctgtctgcctccttctcagactagttaaactttcatactccatccttgttccttcgcttctttcttaggatcttctgtgcacttctttcttaggatcttcttggcacttctttgctcttgaagggcagaaacgctattgtagaaattcaaggcactgtatgctgacatagtttatagttgtctttttcatgagataacacagcggctggcagctcctcttttctatcaaggacagtactgctggctcaggagagcagtaagcaaacagaagctgtctctcaaccctgtacaaagcgaaaccactcttttccctacaaaagtgagctgtgccccagaaaagcggatctgctgctgagcagggctcctcatgtctcctattgttcctgaaaaacagcatcaaagagggcaagactgacacacaatgttgtagcattaggagcctttttcagaataaaaaagcaatcagtcatatgaagcatgtggtcataccacaatcaacaatttttctccacaactggagatatggatttttctaaaagtccaactgattcatggccctgatacggggcagctctacctctcatgagaccaatgaccaagtgactctgactccaggaatctctgacagaagccaagctggaaacggctcaggaaacctgagctagaagatgcccttctgacacctgggaaacaaaacctcagtgtatggaggaacccaaggttttgtgttgagccccagtcgccaaggtctgaggaggctgggtttatattggccccgattttgtggccgaggcacaaggggaattgaaaggttgttgtgaggacctgctcggaatgtctttctggaagtttggagagggtctctcaaatgccaaaatttccatgggaagccattttcacagctgcttgggagtgggagatattcgtcatcatttctgccccatttagaataatttattactttgcttgcaaaaacccggaatcatccataggacacacgttgtttgtttttccactccacaccaaaggacagaggcattcctggttaatccaagatgccaacttcaagacattctgagaactagctggacagagctgaagtgtagggcaaatcagaacagaagtgatgggcccagggcaaaagcccgtgaagcagcagctgcggaggaaggatgggagctggagctgcaaagggggccatggtggagactctgggcctgcccacagtatcccctctgcccaatgggaattcagttttcctgcatatcattcaattatttctcatttttctaggcctagctcaccttattcgggaagttttgcgactaccccagtccataatgaatttcctctctagactatttcaattcttacagtcactaccacacagtctaggatttggttagttggttgatttcattcatttattcaataattcaatgtttattgagttcctactatggactttgtgccaggtatacaaaactgaatgttactgttgtgtggggtttttttctttgcatttttaaagttaacctggatttttctctcactctttatgcatgtatttcctaatctccctataaactatttgtatttttttggattcctcacagtctatttagcctgtggactgtcaacagatgttacatcattcagtcatttaatagatgcttatttgctagacatggccaggaggacctggaaagtcctcatttttcccatctgttcttaccattctgaaatgtatcatgctcttcagtgctccacagatctagatgatatcaaattattaaatggaaaaagcaagacccatctccttgggttattgtggataagggggaaattgtgtaggaagtgtctattgcagttcatggaccattgtaggcccttagtcaacaacagctatcatcatcactgatgagaatctctggcttaaacggagtaggttcatgccttttttcagtgtaatgaagtgttttagtttaaaggcctttagcaaggcttacaataaaaaaaagtggggactccagggtaacaccaacaatagagacgaccatggctgttatcctgagactattaattatgccacgtaattagatttagagaaaacttagagcaacatttatcttgtggataataattgattgtgattgggacttaccgttgagagaccctgatgaaaactctatggtgaattgctgtggagtcacatgggttcatgcatcattcatcagtgggccctggttttagcctcataacccctgagaatccacctctatcagaaaaccaccctttcagtgaaagttcctcaaggctcagaaaaattcatatgtcaaagctttatatgtaaaaacctatactctctaataaatgtttggtttggccttcacattcaatttaataattatttctacctcttttctaaaccgctcttaaccacagttctatatatttaattctgaagagcctcatgcacctccctccctggtaactttatctacttctctccctggagaaccagccagaccatgattccagccctctgtcctctcttcaaccgtaggtcctctttttctctcctgactcctcaaaccttctccagttacccggatgccttctgtgtgctgctggcttctgcatcactgttcacagggccacttgttcccctggaaatgtcttatgctcttgaaatgctatagccttgttcacctgttcatccaaaactgatcctcagacaacatttctctttcaattggtggaataataaagaggaatatgggtcaaaattcatagacatttaaatacccaaggtgcaaagttaagagaaaacaagataggagaaagaattatggcaacatctctaaaatgtgtactttagtgtttagcaaaaaagggactatggaatgtcaaacaggaacatatatgttaaacataaacatgaagcagtgccagctgctgtctgccatatagtcatgctttgttaatgtggcacatcttgccatgatggtgccctcatgaaacgaaggatgctgaagcagatgccattctgtttgctttgatcagaagccactctctggtcaaggaagtatttgtttcatgcttaattataacaagttctcatcacaaagattattttctttctccagatctggattgtttgcactcactttatattattagacaattactcagattgtttatgtttttatgtttagaaataagacagtgattcagagagtccctgtatttagatgaaagaacattttttaaacatattgactgtaaacactgaaaatcattaattctcaacagttgaaggtttctgacaggaacggcccttggaaattgtaaatgggcacattgtcaggtatgcccattgttgtcacattggagaagattggattctgttctctctggagtcctttgtaatgccaagcttcctctccagggagctggcttattgtcattattttgagataaatggcacttcatagtattaagtggttcattgtctcttctctggctgactgtattctgtaggcagccactcaactttggagcctttctctgctaccaacttttggtgttgccttaagcaagcctcatggctcctgttagtttcctgacaacatggtatagcatggactttgtcatcagagaggactgaattcaggagaagcaactctgccacttccttggcggaagggggatgactgatgtcctttgataagctgcttccctgagcctaataaaaaaatagaaataatgatacttaaactcatggaattgttgtgacaattgaaagaatgaccagttagtaaagcatcttgcaccatgactagcacacagtagatgcacatgagtgttactaagctttagttatgccctccaaatacaaagccttagttttgtcactatgaaagaaattactctgttcttcttagcaggtaataaataaatccctgcctggaaattctgcaggagaatttcacccctgcgctttcaggttaaaagattgcattcccatgatgaagatgttctgtgaatagaatcatctcaagtcccaaatggtgtggatttgctcctgcatcttgttgcagagattctcttggagcttctgagaactggggaaaccaacaaaatgcctgtagcctggggaaaatgtagggagttttagcatgaatttgtgggaggtgagaaaaggcagcaggtgtcgaaagacgggaaatccttgcactgttctagatgttaggagccattttccattcacattcagcacctcaggaggagaagctgcctatcactttgtgtcctcaagagaaccaacaaaggagaatgccatctcccagatactcaatttgattaccattttatcctaccttctctagggtccagacattatgtaaattggcattaagtttgaataatgtatggacccagtttaaaaggaaaaaatgctttgggaggctgaggcaggtgcattgcctgaggtcaggagttccagaccagcctggccaacacagtgaaaccccatctctactaaaaatacaaaaagttagctgggcacggtggcgggcacctgtaatcccagctactcaggaggctaatgcaggagaatcacttgaacctgggaggcagaggttgcagtgagccaagatcgtgccattgcactccagcctgggtgatgagagcaaaactccatctcaaaaaatttttaaaacaaaaggaaaaaatgctcccctgattcccgcagtgctgacttaaaatgttcttagtatgccaatgttgcttaaatatgaatgactgtagcttctacttaaattggcaaccgcaccaaatataaactgcaaatgtttatagctcttatggaagtataaaagcaaaacaaattcttaaattaaatacaaactaagagggaaactgataataacaatgttttgtgtaattaagttgctgtttgcaacatgcctggggcagactcctggcctctttgcatctgacatgagaggctaccaaggatgtggccacaactgggctctcccagcacttgcttgcgctcagaactgtgccaaaacctttgctcgcccagtgttctgcaacgtccatcatttggatttggcaggaacacatcatttatgcattttgtttgcttctgtatttagttgagatacttaaaatataactgctagattctaaggcattcataagcatctgtgaaaaatgtgttacttaggaaacagttcagggttccatggattatctagattggtgagtcttaagactgaccacacaattcatctgggggtgtggaggaggggagctttgagaaaaatctctgtatgagcacccacacccagagattcctatgcaattatcccagagtggtgccttaatatcaacatttgtttaaaaccatcccccaagactaaaatttgtgaccgggatttagaaccattgacttaattgatgcagaacactctgatattaatgtcttcatgtcttttggaatgtcattaagacaaaagcataaaattttaaaattcttaaagacaatttaaagacctatgagaatccatctttaattctcaggagcgtgtggaacctagtttgaaaactactggcatcgacaattgaatttccactaaaataaaatagctctctagtatattacaaaactacccattctgcaaactgcaggggagctactgatcatgcttggaactgtgccaggcactgcctgcgtaaaaatgagtaaggtccacttcctccatggactgggttgggtaggaggcaaagataattaaccaattattttaatattatgagttcagggttgtaatgaaagtaagtattgagtgctgcagagacccagcaaaggagtccttagctgagaactgatcctttgctgagtgacgaggacattattgaaccgccaggcttgatggcatgttgcatggtaacagaccagtacaccaaacagcaggagctgtagcagagaaagagtttaataattgtgtggcagccaaataaggagacagaaggaaaccttaaatccacctcttgaaaaagtctgggactaggctttttaagagaattctggcaagaaggaggctgaggagctgggggtaactgattggttaggacataggagaggagacaataaggatatagaaactccattcttgcactgggtcagttcctcggagggggtcctcactctggctggcagcagtgaacccattggaatgcaggatctgaaaaatatctcaaaatggcaaacttgaggggttttttttagcatcaaagatgttatctatagaagttaggacattgtgacaggggctacgtgactttgaagtgttaagtggctgtcagaaagtgagctattgcagcggtccccaacctttttggtaccagggaccagcttcatgaaagaaaatttttccacagatggggtggtgtagggtggggtgggggatagcttcgggatgaaactgatccacctcagatcatcaggcattagttagattctcatgaggggcacacagcccagatccctcacatgggcagttcacagtagggttcacagccctatgaggttctaatgccactgctgatctgacaggtggcagagctcaggcagtaatgcttccttgcccaccactcacctcttgctgtgtggctcagttcctgacagattacggactggtaccagtttgcaacccaggcagctggggacctctgggctgtagggtaggctggttaatgcttagctgtgtttctattcaaagcttatgcttttgtttaaaacctagtaatttggttttgttaattttatgaagatgatttcaaggatgagtaggattagctggagtcagaaggacacaagggaatttctggcaacaacattaaactaccagtgaatgtctcatcaagtcactggacctctaattctaagcagtactgtcaaccttataggttatgatgtataagatagtgttgtgatgtataagatagtgcaaaaacctaagttaatatcaccatttctgtagtactctctatttcaaaggaaaaaatcttcagcagtctaatatcctaccaaaattttgaagtcaagacctccctacactaatcaaagaactagaggtgcaatcaggccatatatttggaaaggccataggtgccctccctctgtccttgttcccagcatactaaactatagtctaaaagactttaaaacttgaactgaagaaaaccttaaggaaacaacaacaaaattccatttatttcctgagcccaaaagtagaataattgttttttaatgaatttttctttccctgtaagacatactatgaattgttcaatgggtattcaaagcatatgtaatagaatatgtatgctttcctgaaaaattgaaatggaacatcaaactgttctgtaaagttttgagtctagaccaaactcacagcacttagccagaatatgtacatctgcatctgccactcatggccccatcgctccctccaactgcttctcttgggctgaaggatggaaaagcaaactccctgcgttgagttccatcttgccctgcatggcctcccccatggggtcattgagctccccaccagcttccacctcttccagcactttccgccagagggcccgtggctgcttttgcagactgaaattgattgtggttgattcagctccatttcctctgagtttttactttagatgtgctttttaggttgcatttttcttctggcatataagaaagacagcaacattccatggaacagagtgatgtctgtggctttgtcaaccgttgtttgttagcttgatcaccatttattgagtgtttactactttccaggcattgtgctaagtggtagaaatacaaagttgcctttacttgattcatctgtaaaatagagagagtagtagttcctacagtgtggtttatgtgaggcatagggactgctccctgaaacctagggacaactccctagcagcgacccagtgctcatatcaatagtggtaacaattaggaaggcagctcctacctcaaagacctcatgatctgatggtaaagacagatataacaagaaaattattctttttaaatataaaattgtgatataaaaatagttttcactaaattggatttttatgaaatttacagaaacaaaataataaattaaggaaatataaaaccacctgacattagccaaccatgttgatgttctgattatgttactgcaaaggagtgtagggttaagaacgagggactttgattccaagatcaaatccctttctgctatttcttagctgtctgactttgggcaagttgcttaaaccctttgtgcttctgtgtgcttgcccatgagatggagattataatagcgtctacctcatagggctatttttaatacaagttagctcttagaacaatacctacttaaactaacaatttgtattaggtactgttttattctccatccgtactgtgtatgcatatattcatatttatatttacatattctaattaggattatatacatgtactttctttaaaaataagattttaaataactatataatcagtcatgatgatacaacatgatttattcaacaaatctgatgctgttaaacacgtaagtgatttctctttcaggattataaataacatttgttttgcatttttttcatacatcttttgctcacttttcattgttactttgtatatgttgctagaaattgatttgctggtgaaaagggtataaacatttttaaggctcttgctacatattgcctgctcttcatacatattgcctactgccccaggaaactatcaattacacttttaccaagagtgtatgaaagcattcacatgaatgtaaccttatcatgcaatgcgggccatgagacagaggagagttatggagggtagacggcttccccgctgctcagccactgccctctcctctaaaagagccacagtcaggaatttctacatagatcctattataaacatctccttttgaaacaaattatcttctctcagagcattttcttcattttagtatctatataggtccttgttatgttcattttaagttttgtgacctgcactgacacaatgctgatgaactgcttattccaggcagtctgagttctcaaagcatttgcattttatgtcttatcctctgttttgggctctttgccactgatttttttttaagtgatattttaagaaagaggagggttgatttgttgtgagtgtatctctctttaaaaacttttctagggaaggacaacctcttccaaagactttgtttgctttgtgtgattggcatgtccttccctggtcagtaatgagcttgaaggaagctactggacacgggactgaacatggggttttgctatcactctagctgtgcctttctctagtgatcaaggagatgttggttcagaaagtgccctgtctaatcccactaaggcccgaaggaccaagtgctgtctactctccagattctctgcaacagaaagcagatgcttaggcttcatggtccaggttggaacaggtagttagctctgaggacagttatgcatgaatgtcaggaggggactggcaggggaacatttatttattctttaaaattggaatcaacagttatggatgaaacccagaatgcaaaattcactttcatcttgacacgcaacacatctgtcctttctccttgaatagcaagtattaatcattgagttagacaatgtaaccttcacattcagtgaaagccaaacactcagcaccttctagaaaaatcttagtgccatgctttcttagcatattgcaagtcctctgaggatgatgtgttgttcagctttgaagctgatcttttgtacttgcttatgtagctcaggctagtgataacatgccagaggcatttccaactaagaaaattattcacagaagctttaattacaaatttgttagccccacttcctgctaaaatggccagccttgaagagtttcggaaatgtgagcagccttaaggatgatagaaatattatgaaatagtaataagtaatacccatacagcaaactcctttttctttggagtatccgttcatcagccagatttccctctcaacagtccaggtgttgacgaagatcatgaaataataggaatgaaagggacttcgattttgtatttttaatagcattttcctccaccaaattacgaaagtaatgcatgaccaaggcagagaacttggaaaatacagaaaagccaccaagcaaaataatctcccaagaaatcataatttcaccacacaaaagtaaccattgtcaacattttggtgaaaatccttaattaaagagactcttaaaagatgccagttcgctgccacttcttcctttctccacaccatcctgcaccctgttttgaaatgcagaattgtttctaaatcattccaggaaaattattagttttctcaaatatctctggaggcgagtctgttggcagtcatttctagtttctcacaaaccttgaagttaggaaattatttgtgtagcttttgagcactgggccagaagtgagggatgtttgggttctagttccagctctaccacttatttaccaactggccgacctcaggcaagtccaggctagcggccccgcctcaagcccctccagatgcagcatctgcaaccccacttccttcacttcctttcgcctcagtttcccaacaatttcctagtaattgtactgaatcattgtttttcattttttacattaaaatttatttattttattttatttttaaagactttattttttagaacagatttagatttgcagcaaaactgagtggcaagtacagaaagttcccatatattccctgcccccgcacatacacagtctccctcactatcagcatccccaaccagagaggtacattggttacagctgatgaatctacatcgacacgtcattatcacccaaagtgcatagtttgcattggcgttgggcattttagggcttttgacacatgtatgcactattgtaatatacagaataatttcactgccctaaaaatcctctgtgctcctcctattcattcctccctccaccccattcctggcaactactgatctttttactgtctccacagttttgccttctccagaatgtcatatacttggaatcataaggtttgtagccttttcagattggcttctttcactcagtgatatgcatttaaggttcttccatgtctttttatggcttgatagctcatttctttttatcattgaatactactactccattgtctggattatacacactttatttatacattcacctactgaaggatgtgttggttgcatccaagttttggcaattatgaatgaagttgctgtaaacacccatgtgcaggtaattgtgttgatatgcatttttaatgcttttggataaacactcaggagcacaattgctggattgtatagtatgtttagttttgaaggaaactgccaaaccatcttcccaagtggctgtaccattttccatttccaccaacaatgagtgagagttcctgttgctccacatcctcatcagcatttggtgttgtcaatgttctggattttggccattctaacaggtgtattgtggtatctcattttgttttaattcgcattttttggataatatcacatggagcatcttttaataagcttatttgccatctgtgtgtcttctgtggtgaggtgtctgttaaactctttggtccatttttttaatcaggttgtttgcgttcttatcgttgagttttaaaagctctttgtatattttggataacagtcatttagcaggtatgtcttttgcaaatattttctcccagtctgtggcttgtcttctcattctctggagatcagtggtttttacactttcttctgctgaagccaagtattgtggaagaagccatggggtcaccagaggataggtgcacagggtagtgagggaaagttggagtgaatgggcttggtgcccccaccccgcaacatttctcttgctttaatcagagaagtttgacttcatccagattgcatatgaggactttacatgaggttcacctttttatttgttttaaaaggggtttttactctcaaaatgttttaaagaccactgaactagatgatcatcttaaggcccttttaagatttatgattctggaattctgtggctctatttttccaatgtaatataaccttcctctcgttaaggaaaaatgagataaacctgttataaacactcatgtgacattttttcaatacagttttcatccacgtagtgctcacttagaatgatagaaacaatacacctaaagaatatgcaccattcacttgcccactcatctctcaaagagaggaactttcaacactagttatctttttaaaaataatcagagagaattctcagccacttcaattctagcccaggaaaaagagggaaaatacatttgaaggtttctggctcatgtgatacatttgcaaaccagaaccaagatgatatgactctcatttattagtgactattgcaaagctttgcaggctattaagcaggctgttcaatttagggtgatatggacatgtgcatattggccaattatatatgctcagatcgtatgtcattttttttctgcattttagtctaagtgtcagataggtgtttcatgatgttttataaacacttctgttcacattaacattgttcattgatttggcaaggaatgaaggggtgtcattttcatgattttatttgtatattatgtattccacagaggatttgaaatgccttaccaaattttatgtaatgtaaaggggtaaaccaatatttgacacatcattataaattgaggataatctgaagaaaataataaatccaggagacagattatcacactgatatggtttggctctgtgtccccacccaaatttcatcttgaattttactcacataatttccatgtgttgtgggagggacccagtgggagatcatttgaatcataggagtggtttcctccatgctgttctcattgtagtgaataagtctcatgagatctgatggttttatcaggggtttccacttttatatcttcctcattttttctcttgccaccaccatgtaagaagtgcctttcgcctcccaccatgattctgaattctgaaccctccccagccatgtggaactgtaaatccaattaaacctctttttcttcccagtcttgggtatgtctttatcagcagcacgaaaatggactaatacagtaaattggtacaaggagtggggtgttgctgaaaagatagccgaaaatgtggaagcaatcttggaactggatatcagggagaggttggagcagtttggagggctcaaaaaagacaggaaaatgtgggaaagtttgaaacttcctagagacttgttgaatggccttgacaagaatactgatagtgatatgaacaataaagtccaggctgaggtggtctcagatggggatgaagaaactgttgggaagtggagcaaaggtgactcttgttatatcttagcaaagagactggtggcattttacccctgctgtagagatttgtggaatttgaacttgagagaaatgatttggggtacctggtaaaagaaatttctaagcagcaaaacattcaaaaggtgacttgggtgttgttaaaagcattctgttttaaaagagaaacagcataaaagttcagaaaatttgcagcctgatgatgcagtaggaaagaaaaacccatttttttgaggagaaattcaagctggctgcagaaatttgcataagtaacaaggagccaaatgttaatccccaagacaatggggaaaatgtctccagagcatgtcataggtcttcatggcagcccctcccatcacagacccggaagcctaggaggaaaaaaacagttttgtgggccagtcccagggtccccatgctgtgtgcagcctaggaacttggtgccctgcatctcagctgctccagctattgctaaaaggggctgaggtaccacggtttcagaggttgcaagccccaaaccttggcagctttcatgtggtgttgagcctgtgtgtacacagaagttaagaattgaggtttgggaacctccacttatatttcagaagatacgtggaaatgcctggatacccaggcaaacatttgctgcagaggtggggccctcatggagggcctctgctagggcaatgaggaagggaaatgtggggttggaacccccacacagagtccccactggggcactgcctagtggagctgtaagaggaggaccactgtcctccagaccgcagaatagtagatccactgacagcttgcaccatgtgcctggaaaagccacagacactcaacgccagcctgtgaaagcagtcagggttggaggtggtggtggctataccctataaagccacaggggcagagctgcccaagactatgggaacctacctcttgcatcagcatgacctggatgtgagacattcagtcaaaggagatattttgaagctttagaatttgactgccctggtggattttagacttgtgtgggccctgtaacccctttgttttggccaatttctcccatttggagctgctgtatttacccaatgcctaaacccgcattgtatctaagaagtaactagcttgattttgattttacaggctcataggcaaaagggacttgccttgtctcagatgagactttggactgtggacttttggttaattctgaaatgagttaagactttgggcgactgttgggaaggcatgattgcttttgaaatgtgaggacatgagatttggagaggccaggggtggaatgttatggtttggctctgtgtccccacccaaatctcatcttgaattatactcccataattccaaagtgttgtgagagggacctggtgggaaacaatttgaatcatgaggccagtttcccctatactgttcttgtggtagtgagtaagtctcacgagatctcatggttttatcagggtttccgcttttgcatcttcctcattttctcttgctgctgccatgtaagaagtgcctttcacaagcataaggaagaagtatacttgctggagcagcaggctgtccttcttctgacgatatggactgcaagtgcctatgtttactttgaccaagatggcctttcttttcacagaaagccagggttcaccccttgaatttcataagacctctctttgcagtgggttagatactcttttatatttttatactctgtcaggaaaacatttttttttccatttaaaaatcaatcttttggttgcttccaagatggctgaataggaacagctctggtctgtagctcccagcgagatcgaagcagaaggcaggtgatttctgcatttccaactgaggcacctggttcatctcactgggactggttggacagtgggtgcagcccacggagggtgagccgaactggggcagggtgtcacctcacccacaaagtgcaaggggtcaagggatttccctttcctagccaagggaagccgtgacagactgtagctggagaaacagtacactcctgacaaaatactgcacttttccccacagtcttgacaactggaagaccaggagataccctcccttgcctggctcagtgggtcacacgcccatggagacttgctcactgctagcgcagcagtctgagatcaacctgcaatgctgctgcttgatgcggggaggggcgtctgccattgatgaagcttgagtagctcacagcgtaaacaaagcagcagggaagcttgaactgggcagagcccacctcagctcagcaaggcctactgcctctctagattccacctctgggggcagcacatagcagaacaaaaggcagcagacagcttccgcagacttaaacatccctgtctgacacctctgaagagggcagtggttctctcagcacagtgttcaagctccaagaaccaagagaccgccacctcaagcaggtccctgacccccatgtagcctgactgggagacacctcccagtaggggccgacagacacttcaaacaggcaggtgccctctgggacgaagcttccagaggaaggatcaggcagcaatatttgttgttctgcagcctccgctggtgatacccaggcaaacagggtctggggtggacctccagcaaactccaacaggcctgcagctgaggggcctgacggttagaaggaaaactaacaaacagaaaggaatagcatcaacatcaacaaaaaggacatccacaccaaaaccccatctgtaggtcatcaacatcaaagaccaaaggtagataaaaccacaaagatggggagaaaccagagcagaaaagtggaaaattccaaaaaccagagcgcctcttctgctccaaaggattgcagctcctcaccagcaagggaacaaaacaggatggagaatgagtttgatgagttgacagaagtaggcttcagaaggtcggtaataacaaacttctccaagctaaaggaacatgttctaacccatcgcaaggaggctaaaaaccttgaaaaaaggttagatgaatggctaactagaataaacagtgtagagaagaacttaaatgacctgatggagctgaaaaccacagcatgagaacttcgtgatgtatgcacaagcttcgatagctgatttgatcaagtggaagaaaggatatcagtgattgaagatcaaattaatgaaataaagtgagaagacaagatgagagaaaagaagagtgaaaagaaacgaacaaagcctccaagaaatatgggactatgtgaaacaaacaaatatatgtttcattggtgtactgggaagtgatggggagaatggaaccaagttagaaaacactcttcaggatattatccaggacaacttccccaacctagcaaggcaggccaacattcaaattcaggaaatacagagaacactacaaagatactcctcaagaagagcaaccccaagacacataattttcagatttaaaaagtatgaaatgaaggaaaaaatgttaagggcagccagagagaaaagtcgggttacccacaaagggaagcccatcagactaatgggatctctcagcagaaaccctacaagccagaagagagtgggggccaatattcaacattcttaaaaattcttaaaaaaagaagaattttcaacccagaatctcatatccagccaaactaagcttcataagtgaaggagaaataaaatcctttacagacaagcaaatgctgagagattttgtcaccaccaggcctgccttagaagagctcctgaaggaagcactaaacatggaaaggaacaaacagtaccagccactgcaaaaacattccaaattgtaaagaccatcgacgctatgaagaaactgcatcaattaacgggcaaaataaccagctaacatcagaatgacaggatcaaattcaaacataacaatattaaccttaaatgtaaatgggctaaatgctccaattaaaagacacagactggcaaattggataaagagtcaagactgtgctgtattcaggagacccatctcacgtgcaaaaatgcacataggctcaaaataaagggtcgaaggaaaatctactgagcaaatggaaagaaaaaaaaaagcaggggttgcaatcccagtctctgataaaacagaatttaaaccaacaaagatcaaaagagacaaagacagccacaacaagaagagctaactaccctaaatatatatgcacccagtacaggagcacccagattcataaagcaagtccttagagacctacgaagagacatagactcccacacaataataatgggagactgggagacaccccacagtcaatattaaacagatcaacaagacagaaggttaacaaggatatccaggacttgaactcagctctagaccaagtggacccaatagacatctacagaactctccacccctaatcaacagaatatacattcttctcagcaccacattgcacttattttaaaattgaccacataattggaagtaaaacactcctcagcaaatgtaaaagaacagaagtcacaacaaactgtctctcagaccacagtgcaatcaaattagaactcaggattaagaaactgactcaaatccacacagctacgtggaaactgaacaacctgctcctgaatgactactgggtaaataacaaaatgaaggcagaaataaagatgttctttgaaaccaatgagaacaaggacacaatgtaccagaatttctgggacacatttaaagcagtgtgtagagggaaatttatagcactaaatgcccacgagagaaagcaggaaagatctaaaatcgacaccctaacatcacaattgaaagaactagagaagcaagagcaaacaaattcaaaagcaagcagaaggcaagaaataactgagatcagagcagaactgaaggagacagagacacaaaaagccgtgcaaaaaatcagtgaatccaggagctggttttttgaaaagatcaacaaaattgatagaccactagcaagactaataaagaagaaaagagagaagaatcaaatagatgcaataaaaaatgataaagggatatcaccaccgatcccacagaaatacaaactaccatcagagaatactataaactcctctacgcaaataaactggaaaatctagaagaaatggataaattcctggacacatacaccctcccaagactcaaccaggaagaagttgaatctctgaagacaccaataacaggtactgaaccaaggtttggaccaaccaaaaatgtccaggaccagatggattcacagttgaattctaccagaggtacaaagaggagctggtaccattccttcagaaactattccaatcaatagaaaaagagggactcctccctaactcattttatgaggccagcatcatcctggtaccaaaacctggcagagacacaacaaaaaaagagaattttaggctaatatccctgatgaacatcgatgtgaaaatcctcaataaaatactggcaaaccaaatccagcagcacatcaaaaagcctatccaccaaaaccaagtcagcttcattcctgggatgcaagactggttcaacatacgcaaataaataaatgtaatccatcacataaacagaaccaatgacaaaaaccacatgattatctcaatagatgcagaaaaggcctttgacaaaattcaacagcctttcttgctaaaaactctaaataaattaggtattgatggaacgtacctcaaaataataagagctatttatgacaaacccacagccaatatcatactgaatgggcaaaacctggaagcattccttttgaaaaccagcacaagataagaatgccctctctcaccactcctattcaacatagtgttggaagttctggctagggcaatcaggcaagagaaagaaataaagggtattcagttaggaaaagaggaagtcaaattgtctctgtttgcagatgacacgattgtatatttagaaaaccccattgtctcagcccaaaatctccttaagctgataagcaacttcagcaaagtctcaggatacaaaatcaatgtgcaaaaatcacaggcattcctgtacaccaataatagacaaacagagagccaaatcatgagtgaactcccattcagaattactacaaagagaataaaatacctaggaatccaacttacaagggatgtgaaggacctcttcaaggagaactacaaaccactgctcaacgaaataaaagaggacacaaacaaatggaagaacattccatgctcgtggataggaataatcaatatcacgaaaatggtcatactgcccaaggtaatttatagattcagtgctatccccatcaagctaccattgactttcttcacagacttggaaaaaaactactttaaagctcacatggaaccaaaaaagagcctgcatagccaagacaatcctaagcaaaaagaacaaagctggaggcatcacgctacctgacttcaaaccatactacaaggctacagtaactaaaacagcatggtactggtaccaaaatagatatatagactaatggaacagaacagaggcctcagaaatgacaccacacatctgcaaccatctgatctttgacaaacctgacaaaaacaagaaatggggaaaggattccctatttaataaatggtgctaggaaaactggctagccatatgtagaaagctgaaactggatcccttccttacactgtatacaaaaattcgctcaagaaggattaaagacttaaatgtaagacctaacacctagaagaaaacctacacaataccattcaggacataggcatgggcaaagactttatgactaaaacaccaaaagcaatggcatcaaaagccaaaatagacaaattggatctaattaaactaaagagcttctgcacagcaaaggaaactatcatcagagtgaacaggcaacctacagagtgggagaaaatttttgcaatccacccatctgacaaagggctaatatctttgtagaatctgcaaagaacttaaacaaatttacaagaaaaaaacaaacccatcaaaaaagttggcaaaggatatgaacacctttacactgttggtgggagtgtaaattagttcaaccattgtggaagacagtgtggtgattcctcaaggatctagaactagaaataccatttgacccagtgatctcattagtgggtatatacccaaaggattataaatcatgctactataaagacacatgcacacatatgtttattgcagcactattcacaataccaaagacttggaaccaacccaaatgtccatcaacgatagactggataaagaaaatgtggcacatatacaccatggaatactatgcagccataaaaaaggatgagttcctgtcctttgcagggacgtggatgaagctggaaaccatcattctaagcaaactatcatgaggacataaaaccaaacactgcatattctcactcataggtgggagttgaacaatgagaacacatggacacagcacaaggaacatcacacaccggggcctgtcaggggttggggggctgggggagggatagcattaggagaaatacctaatgtaaatgatgagttgatgggtgcagcaaaccaacatggcacatgtatacctatgtaacaaacctgcacgttgtgcacctgtaccctagaacttaaagtataataaaaaaaaaagaaagaaaagaaaagaaaaaaagaagtggcttttacctcccaccatgattctaaggcctctcagccatgtggaactgtaagtccagttaaacctctttttcttcccagtctcgagtatgtctttatcagcagcgtgaaaatgaactcatacacacacacagaagtatatctttacagttcccaggatggactgcaagtttggctctaaatttcctttgcctggccaaaacaaaaagaacacattttattataaggttcacaggcttttaattgaaaaaaaaaaaaaaacagttattcaacatgaaaactctttttcagacaaagttctacaaagtctatttctcacaagtaggactttggcaaggattgtgcaactgacaattcaaagtcatttattccgtggtgagaaaccggagtacagatctttaccagttaggggatgatccatgtgttttgataatcaccttggtggtgatcagactaaaggtctcctatgaaaaccattaacttcacactatagctgataggatgcactgaagcccttaccgctgactgcatggatgagagctaggccagagcattggcaggcagagtttataacatggggcaggaagcattgaaattctattccacctcttggtgtatcaggtcaggagtcaaatctcctatcttcctcttctggatcgctttcctcctgaagtgtctggcatagatgtctaggtatagcttggcatggtggtgtgtgcctatagacccagctacttgagaggctgaggtgggaggattgcttgagcgcaggagtttgaggctgcagtgagccatgaccacaccactgtactccaccctgggtgacagagcaagaccctgtctctctttctaaaaaaacaaaacaaaacaaaacaaaacaaaaagaaaaaaagatgtccaagtgtgttctggttactgctgctgactgctaaatttaacagctagaaaaaaaaagtttggactctatggatcataaatttggataagacacagagggaatggcttgtctcatgttcacaatgtctaaagtcttaaatggggagagtcgtcaaccaggggtaatttgagagttatgggctggaaccaccttgaggcatctttattcataggctagcaattgatgttggctgttggctgggacgtcagctggagctgtcaactgggagacctgtctgatatcccagcataggacactagacctctcacaaagtggcgagggctccagaagcaagtgtcccagctgacaaaaaaaaaaagtttcatagccttctacgacatgcacttagaagtggtaatgtgtcacttccagccctttctgttgattacaagtgagtcatgagtccactcagtttcaagggagagggcccagatcccatatctccatgggaagagtgccaagaacaccttgtagaaaagcttgtggataggagatattggtgtggtcatccttggaaaacacaatcttccacagtgtgcaagagaggcttcctgctctgcattgtggcttaattattgttgaaataccaggcaagaaaaggtaggatccagggaaacaaatgtatccaggatgttttggtctgccttttctaggaaaaaaggaaaccctcaaagcctctgagactaggtcaccccagtgggactagaagttccacgtggaaccttctgcaaactcctctgcaatagatggactgtgcattttccaaatgtgtctttacatcatctcctttctgaccttgggaagatagtaactgactgtggagtaggaaatccagaaccctgattgttttaaaatatattacagatacaagtaatgaaaagaaggctcctaaggaaaatatagatccgtaatggctttgtcccaaaagctattaggctataatattttattacaaaggctatatttattacaaaatgtatttaaataaatacttaatatttatttaaataaataatatttattttattattaataattaatatttaaataaatataatatttcttacaaaaattaaaaactgggactttatatttaaaggtgagacattaaattctttttaaaaagtgcacatgtaagatttttttctcaagtcaactgaaccagttcatcagtttcactatgaatgtgttgatgcaccaagtatttactttctagaacatctagtagacgtcactaaaaaattataccaagttgaaaaatgtcactgaatcagaggcatgtggttggttatgtagtcatctgtgccagctgggaatatagcaataccaaatgaacagcactgccatgttcccttgctgggttccagcaaaaacactcatcttcactgtcgtctctctttgagacctcttagagaggactttgatgagtgtatggtcttatacacactagtctaacaatacacatttgctcaaggattgggttacgagcaggctcttcacctttcaggtgaacaattacacatcaggagaaggatggaagtttcctatctatgaacaaatatttcccaaagcaataatctctttattcaactcacataatgagaagtcagttcctctgtgccataaagcaatctctttgaagtcttcagtaatgttgagggttttaatgttgagggctttatcaaactaaacattcaagtgtcttaggctttccccttagttctttgagcaaattggttgctatgaagtatgttagtgttccgaatgaatggatagcatgatgggggatgtctaggtggttccagaatttagattgtggtttccataacaaagtgtggcagtattggcattagggaagagaaatgacttctaaataacttctcaaagtttactaaagccttaagaatgtaggaaatggccacaaaaggaggtatacaaaacattcctctgtctttattcctctttatacaaacgtattcactttcccatcagcaagtcataaaatacttctcatcttgcattacagtaggacacctactataacaataggctacaaaatgtataatggctcaaacacctagcagtttatttcttatttacttaacaatgctgggtccacgaacatgttgatatcataaccctcttttatgtggtcactcagggactcaggctgttgagggctctgtcatcatgaatgggtggcttccaaggtcatcctaagagttatctccattctaaccagtccagccagaaaggcagaacaggcttggaggagcaaagatatccatggatagatcatcctcttaaagtcattgtagcattgtgatagggctcttttcacaaaacaaggatacagtccatgttttcaagattttacattttagtagccacaatacaaagaagctaagatagtcttgtgatttgtcatcatggctgttaatggagagtgttttaaaagcactgatatcagggctccaccctcagcttccaatcatcaggtttggatggaacctgacagctgcatcttgtaaaactccacgggagattctgagagacagccaagtttgagattcacaaaccttaagagaaaaaatctccttgaattgccataacaaactaccagtctaataaaacatacatattcctttgactactcttaaatgaaacaaataggtaataatttacctgtacatataattaaaaatgtaatgtattttataaccatcatataaaggagaaattatattaaactatattaaaataaaatgatatatatttcaatgcagatgcccaagcttgactaaagtaggaaacataataaagtaataaaatgcttatatgtacttataatgaatgtttggctatgagaagatgatcagaggctttttgtccaagaagtacaggcatatgaaaaagtagagcaagagatggacaccagactgagaaaactaaaaactaaccaacctatttgtgtatgataaaaggagagaaaaaaaattgattagtaaaaatatgctaccgtgtggtctgaatgtttgtcccttccaaaactcatgttgaaatttaatcccccatgtggcagtattgagaagtgggacctttaagaggtgattggttcaagaagattctgcgctcatgagtggttgaaaccattcacggaataacgggttaatggatcaatgagttatcccaggagtgggactggtagctttataagagaaggaagagagacctgcgctagcacactcagcctccttgccatgtgagccatctcgggaccccgcagagtccccagcagaaagaaggccctcacccaatgtgtccccttgacctaggatttctcaacctccataactgtaggaaatgaattccttttctttgtaaattatccagtttcaggtattctgttataaacaacagaaaatgggctaaaacacacgccaagaaaattgaaagactgtggaagtgaaagaagaataaaaaatgaagtaattttgcaaatgagtctggctttattataagtgtattgtcaaagtgattccctttgttataagatgaaaaagagccaaaatggatagaaacatttatcctatcttaatatcccactacattcaaggcaaatattcagtcagtctctagaacttaacaaggccttggagatgatatcctttggatgagcaatggagaagacaagatggattggaaaaagaaacaaacaaacaaaaaaacatgtaagaggctatcaggaaaactctggagacgatgtcaatgtaaaacagatacaaacctcaaaataattttaatatgtacattgcacaaaaatggacttcttatcatgttacaaatttattttaaaacatataggaggcaacaacaatatttcattgatgtgtactattttataattgttggctctaattttatttagtagagtcttacatctcctctctacatatttacatccggttgtattgtttttgtagtacctgttcaactgcactgaaatcatttcaattaaatgcatggttgaaaagctgacataatacattcaattgccaaattgcataaagtgaataagctatttaataatttggagaaaatatattccatttaaacttccttctctataaccagttcatacactggaccttttgggcacagccatgtgaaagcttttcaaaacttttcactacttttttttgagacggagtctcactctgtcacccaggctagagtgcagtggtgcgatctcggctcactgcaacctccacctcccaggtccaagtgattctcctgcctcagcctcccgagtagctgggattacaggcacctgacaccacacctgactaatttttgtaattttagtagagacaggatttcaccatgttggccaggatggtcttgaactcctcatctcaagtgttccgcctgccttggcctcccaaagtggtgggttacaggcatgagtcattgcacccagccactatagatttttatttgtagtagatttagttcagtagggcatttgagaggcataggaactggaacaaatccttcattgtttgggactgccttgcacattgtaggacatccagtacagtcccttccacgaagtggcagcagcagcctcgggctgtccaaacaccctgttagggacagtgccactcccggaaccacagaagaaccacaatcataggagaagcatacaacaaacatggtgttcatcggacggtcagcttcagtggcacttttgagcaagcacactatttggttgtagaatgagtccctggcagggcacccgaaaggctgatgtgtgactcatccctagtacctctgagaatgctgaaatctcctccttctccaagctgagtggcagctttctggtccagactacttaaattgtgacttgaggaattttcttcactttttcctttgagtcattctgtttttgatcaagatgcgatagaatgaaggattctttcagggtctgctgtcacatccttcctttgggaacagatagaaaatctggcctggcttgaagagtttgtcctcaaacatctggtaagccataggcatcagcatctcttacttctccagagacatttagatgtgtcccccatctccatggaggcccatggcaaggggacccctagttgtactagagcttccttctgggcacagccacactgcacaggcactgcagtgtacagcacagctcctccagcttccggaagactccattatctagaaaagtgctgagaaatggagaagggggttcctctggggtggagatggaaagaggaaaaggaagggagaatgtccaagcaaaatgagagaaggtgagggacagcagaattgagagtgagggagagggagagagcaagagactgggttgagatgtcttgtacatgggggtgtcctcgtggcttcactcccctttcgtttgtaccactccgtttccccagactcttcctaaatatccccttattggctacaagatccagattgcctagaagctcagatttgctgacagcacctcaagactggataatgacatatagattttttcttgtttccatctttgggatttggagcaatctccagagctgcaaaagcctaccttgttgcaataatatttttgagggtccacactgtctgctcacttgctctatgctgctgggcacagtggtgtggccatccagggtgggagagaccacctgggatatggaaattaccagcagccctgttttgctcttgcagtggttgccaaagcacacgaagcattctgggaatctgaatttctgttgtttctcccaaatggcccctgaagggcaacaggcagcacacatggaccacattttgccagaaaagtccagaaagaagatggctgctgttgtcaactattggcatttcaacaggacctatttttatttctcagtatatttgcacaactaggaagcatctgctgacaaggatgagatgataagctgtattgatgccaaaacaggactagaaaaacaggcttgttctgcaaatggcctgcatcctgagagtccgtgttaagaacattctctctctgcaggcaatatctgctcttaaaacattaacacttgaaaggaagtaaggcttggaatccttagcatagttatgcacacactaggttctcagtaagtgcatgctggatgaaggaacccacacgcaccttaaggaggatggaacattggcagcccaagaaaaaagtcactccccagaggccgagtgccatgtctttgacctccattggcaaggtcatggtgaaatgctgtctcttggggtcgctgaggtcccagcacggtgtgccttcacaccgtgcaaacaataagaagagaagagatgcacacatgtcacctttccaggcagggacatccaagctgtttgagtctccattctgtgatttccttgaacaagaaagggattattggtgaatgaggccagcatcctgggtgggaacaaaaaaggaaattggtagaaagtacatcatccaagttggtctaactcagccctgtggcttgggcgggttcctaggatatccagccggaggcagaggctctaggggatgtgaggctgcactgggtatgatgacacagaggactgtgagaggcagagaaaaggggagaagagctgaggccctcctagccctaacctcccagctcacaccctctgctatctgccacctccaggccaacaccacggccatgggaggtttgcccatttttctgatagacacattctttctctaccaacagcccacatggaacataagtgaagtaattcagcagtttccttcttaatctgctgtctctctgctgcttactcattctgtgctgtttgctttagatcaaggtgccccagggtaccaaaagctacattatcctattcaactgcatggaaaccaagatcccgaccattctggtttgttgttattgttacgttagttttaaaccttagccattttccattctgggcagttacaactctgtttactatgagttcctctgtgtagatgtttctcccatacccgacctacaaactgctacgtgagcagtaacttgtcaccatgttatccgcataaagtcagggattgataaacttgggagcctttagctcttgaaggtgctgatgaggaaggggagaggggaggagaaggaatttgtttgtgagatggtcagtgggctgaatagtggtatgaccaaaaagtgttactataaatacacataatctggaaaacaaaaatactgtcatctcctccctgcaaggcgctgtgattaggcaggatggagcttattgctgcagtgttagaaaatgcatccttgtagtcccaaaaaagcctgttccatcctgcccatctcttgttctcaatacttcttacttcacggtcactcattttcttcctgtccttgggttgaggtctcaacttcttgtaatagaattttttcagttataagcgacagaaatccaactcacactatcttaagcaaaaaggggattcactgatacgtgtgttaggaaggatatatgaaagctcaaaggtcaagtgaaaaaaatgtaagaacgaagaccttggtggggtgtggtggctcacgcctatcatcccagcattttgggaggccgaggcaggtgggtcacaaggtcaggagttcaagaccagcctgcccaagatggcgaaaccccatctctactaaaaacacaaaaattagccgggtgtggtggcaggctcgtgtattcccagctacttgggaggctgaggcagagaactgtttaaacctgggaggcagaggttgcagtgagttgagatgtgccactgcactccagcctgggcggcagagtgagactctgtctcaaaaaaaaaacaaaaaaaaaaaactaagaccttgtgactactacctactacctggatctctctctctctctctctctctctctctctctctcacccccccacactatcacctctccttgttgtcagtagtttcctttctgcagacaggagttccatgtgctgggaagagggccattcagagcctcgtattctcatcctctcagtttagcaatgcgagaagaaaaaacttttgtctcacaacctcatatacaatctcagaaataggctcttattttctggcttgaggctgtccagaggcaccaggcactgtgatggtctcactttctgtcctggatctatctgtggggcccagacagcaggatctatttcagaaaataggcgagagaggaaaaacttatgtggccgtaaaaaacagcggttttcaagtggcctatccccatccacatcataaacttttctgctgaggcttaaaagtgcttagacttcaaacttgatctaaaacagaaatcctacctggaaaaatcaccttccagtcacttagccaatcgctcatcactctctgtctctgaatctcaccatgagtttcacacgtctcccgagagagcgtctcctttatcattaccacatgtggagtcagcagattgggtttcatctaagctctgcctacctactatccgagttccctagcaggttagtgactttctctgcctttttgtttcttgatgtgaaaaggaacaacagtggctgctcacagggttgtcagttacatggtcaattacattacatggacaattcatgatggtgtcagacctgtctgagaaaaggtggcccatgttaccatgacaggccccaaggctaacagcccctttctgggtcatggctcatacaaaggagccctccttggtttgctggtgctctgagacttgcaaatgcattaggaattttacactgtaacccggttttaaatgggtccagagcatccccattgctagactactgtgctgaggaagggcactggctcattgttacatcccatgaacactctgggtctcctagacctcatcctctttgagcttctctctctcactctctctctgcgcattcaggagtgtacacatttctgtccagcaccctgaagtctctggaagagaaggaccatatccaccgagtcctggacaagatcacagacactttgatccacctgatggccaaggcaggcctgaccctgcagcagcagcaccagcggctggcccagctcctcctcatcctctcccacatcaggcacatgaggtgaggcatctgtgggcttcctacaggagagacataaagaaaacatgcccccaaacctatgtgacagctggccgggaaggactggtgcctgcatatggagagtgcacttgtgacagttcctggcatagaataagcataaatgctataggaggacagaagagagaggttttaaatctgcgagggtcacagggcaagtgtcagagaaggcatagaggaagcgatacttacgcttggtttaaagcatgtgctttggggcagtggtttagagattgggtgcagtgtgcaaataggaggagggggccaatcaagagaagtcagtgaatgtacacatcccctgaagacactgggtacatctgttatggtccctgtgtacactcggatattctaaatgagagaccctggggccagatgcctcacggagagtcaatgttgactccttcatacctgttgaaccccttcttgtcacccccattgccattaccctagtctaagccaccatcattttctgttggacttctgtgccagtcactggatgtgtatccctgcctgtaatctagatcctttctagatcattctccatgatgtgtccagagtgatcattctagaaccaaatctgatgtcatcctcctgcttaaaacccttaagttctcattgcttttagataaaatataaaccctttcactttgtttttattactccttatgattcagcccttacttagcttacaaggacttcctcatgtctgagctctagccataatagctgactgttggatgagtcatcggggggaggttcttcttcaggctgcagattggcggtcagccctcctgacctcagctgggctcactcacacatctgggaggcagctgcctgaggccagggtgactctgctctatgcctcatgtctcctatcctccttgtacccacatgttagctgggacatgttctcatcgcaatggcagaggcatgagaaagtgatcctgtttgggcaagtgcattttactcttttctttcactcatgtccactgacatttcattggccaagcaagcatgtggggtgtccagagtcaaagagcgacatgttgccggggtcatgactatttctgagcaataatctaacctatcatagctcagatctcactccttgcaggaagcatctcctaatccttaagacctagttggaacttacactctgttcttccctatggttactgcccattttactatttttctgcccatttagactgacaactctgtgagccatcattgcaatatggcttgcttacccaatatcacctagcatgatgtagagcacatagtaaatactcaacaaatgttttctgtaagagctaaggaaggacatcagcagacaaaatagagtctttctatgccaaaaggtgaaagtggtctcatttccattccattgtcctgtaatttggctagccaaaagcttagtggataccattcccataagtagacctcatctgcagggaagagatggggagactgctgggttatttattgcagactccagcaggaccacaacaatgattcaaagtgatgacactagaaggacaggtgccaatgggtgatgaagccacaatgacgatgtcaagtggtatcactaaaaggacaggtactcatgggtgatgaagcctacatgaccttgggcttacaccaggaccctaggaatgaaagagattccttctcttagtggctatgagggaaggcctatgatgtcttaaggaggttggattcgatcatttttaagggaccttcaaatccttagaccgtgattcaaatggtaagaagtttgctccattaaactcccaggcaccaccctttccggagacaacctttaaaaattattagctcctgggaaaatagatgtatctcattttctttgtatccctcacagtgccatatgtgaagacttacatatggtatatgcccccaacattactactgagtgagtgaacaaagaaatgagggaatgaatggatgaacaaatggctcatggcaggcttttccctgccctgtgaattcggcttctacttggtaagaaggtgattgcaatctctgttctcagggttccccaaggattcctgtgtaacagatgaaggaatcacgtctgtcaggtagagtaggtgactgcattcagagtatacatttccagtctcccctgtctttttcttttgatgagtattatagagagggaagccatgagtggattagatgccaaaatccctggctgagagaataaccttaccctggaggaaaacatattagctttgactctgagctgggaatttcggtgatgttgtagattcaatgcattgcagttgggtgtttttatttgttgaaaggaattgctgaattttcaaatccattaactgcttgtcagcattagcaagcctaattagttaatactaagtaaatttgcactaaatatacaaccctggctgattttactggccacgtctggcagagggcagcagcagggagaaagctctgtagagtttctgttggaatcgtgtgaaaagctggagaggttgcttctctttctctctctctctctttctctctctctctctgacacacacacacacatacacacacacacaattgtaataataataatattttggttcctcactaagccaatctaaatcgcagaagtctattttgttaagtaagcttggccccagccatatgttgctactcagagaatttaatatcagatttcatctgactgtaaacgtgaatcatcaggttgcacaaggaacacagtggcagatccagggggcatttaacttttatagcattttaaatgaaaaaaaaaaaaagtaacacttaaacaagtaatttagatcatgctgtaggccctgaatagctttgatgttgtgttttcatggcaagtctccaacttgagctgaattttcccctactaaaaatgcaaatttttctaagaccttctcttggtcctgctactcatgatacatatttcttttaaaagaaatttcaaactagataatagttgttctcctccccacccccgccaccagtagtgtggtggggcagcagagttgtggctagtggaggagagcagaggaggagagtagggaaaggagaatgccatttgcctacatttccctctgcccatttccccctgcccatttccccccttgttttcctgaacgtgaactgagctctgggcactgttttaggcctagcaggggacaggataaagcctgcttctctaggaattcgcactgagggtgtgagtgtgtgcacgtgtgtgtttggaggcgggagaataaacacaaataaataaaaaggagaatttcaggcagtgataagagtgctgagaaaaacagaacggtgtgaaagaggaaggctgagcctgcagaggcttgaggctgctgccactgggtagcggtaggcctttccgaggaggcggcatttgaagaccggaggaaggttcatgccagcaagtaggaacagcaagtgtaggtcccctaagtcttgggggagcttagttcctttaagggcagcacaaaaatcagtgtggctccggagagcacattaggggagagaggcaggaagagcttggagacatggatggaagctggaccagttgggccttgttgaacatggaaaggcatttagatcgtattctgagttaaatgggaagtgacgtgagagatttaacaatggagcgtcttgaactgctttactcatttaaaatacccactcctgcttggctgaatatctcatgttgtctttttagaagctttggcgatcctatttgaatgcatttaggtcctattggaggggaataggatctcatttgaggccacggaggtccatggaagtcacctgcatagcaaataccctgaaagtggctgcagggagagtgtgagggtgggaccgccctggtaggaggtggaaaatgaaaaacacacggccatgagttccagattagggcttctgaaagccctcagctttcccagctcccatcctaaagtgggtctttaaacaggaagaaagaaagattgctaagtgtctttggagttcctcttccttccccttctagggatttcagcactcctggggctcgggttggctctaaagtagtcctttctgtgtcttcccacctacagtaacaaaggcatggagcatctgtacagcatgaagtgcaagaacgtggtgcccctctatgacctgctgctggagatgctggacgcccaccgcctacatgcgcccactagccgtggaggggcatccgtggaggagacggaccaaagccacttggccactgcgggctctacttcatcgcattccttgcaaaagtattacatcacgggggaggcagagggtttccctgccacggtctgagagctccctggctcccacacggttcagataatccctgctgcattttaccctcatcatgcaccactttagccaaattctgtctcctgcatacactccggcatgcatccaacaccaatggctttctagatgagtggccattcatttgcttgctcagttcttagtggcacatcttctgtcttctgttgggaacagccaaagggattccaaggctaaatctttgtaacagctctctttcccccttgctatgttactaagcgtgaggattcccgtagctcttcacagctgaactcagtctatgggttggggctcagataactctgtgcatttaagctacttgtagagacccaggcctggagagtagacattttgcctctgataagcactttttaaatggctctaagaataagccacagcaaagaatttaaagtggctcctttaattggtgacttggagaaagctaggtcaagggtttattatagcaccctcttgtattcctatggcaatgcatccttttatgaaagtggtacaccttaaagcttttatatgactgtagcagagtatctggtgattgtcaattcacttccccctataggaatacaaggggccacacagggaaggcagatcccctagttggccaagacttattttaacttgatacactgcagattcagagtgtcctgaagctctgcctctggctttccggtcatgggttccagttaattcatgcctcccatggacctatggagagcaacaagttgatcttagttaagtctccctatatgagggataagttcctgatttttgtttttatttttgtgttacaaaagaaagccctccctccctgaacttgcagtaaggtcagcttcaggacctgttccagtgggcactgtacttggatcttcccggcgtgtgtgtgccttacacaggggtgaactgttcactgtggtgatgcatgatgagggtaaatggtagttgaaaggagcaggggccctggtgttgcatttagccctggggcatggagctgaacagtacttgtgcaggattgttgtggctactagagaacaagagggaaagtagggcagaaactggatacagttctgagcacagccagacttgctcaggtggccctgcacaggctgcagctacctaggaacattccttgcagaccccgcattgcctttgggggtgccctgggatccctggggtagtccagctcttattcatttcccagcgtggccctggttggaagaagcagctgtcaagttgtagacagctgtgttcctacaattggcccagcaccctggggcacgggagaagggtggggaccgttgctgtcactactcaggctgactggggcctggtcagattacgtatgcccttggtggtttagagataatccaaaatcagggtttggtttggggaagaaaatcctcccccttcctcccccgccccgttccctaccgcctccactcctgccagctcatttccttcaatttcctttgacctataggctaaaaaagaaaggctcattccagccacagggcagccttccctgggcctttgcttctctagcacaattatgggttacttcctttttcttaacaaaaaagaatgtttgatttcctctgggtgaccttattgtctgtaattgaaaccctattgagaggtgatgtctgtgttagccaatgacccaggtagctgctcgggcttctcttggtatgtcttgtttggaaaagtggatttcattcatttctgattgtccagttaagtgatcaccaaaggactgagaatctgggagggcaaaaaaaaaaaaaaaagtttttatgtgcacttaaatttggggacaattttatgtatctgtgttaaggatatgcttaagaacataattcttttgttgctgtttgtttaagaagcaccttagtttgtttaagaagcaccttatatagtataatatatatttttttgaaattacattgcttgtttatcagacaattgaatgtagtaattctgttctggatttaatttgactgggttaacatgcaaaaaccaaggaaaaatatttagtttttttttttttttttgtatacttttcaagctaccttgtcatgtatacagtcatttatgcctaaagcctggtgattattcatttaaatgaagatcacatttcatatcaacttttgtatccacagtagacaaaatagcactaatccagatgcctattgttggatattgaatgacagacaatcttatgtagcaaagattatgcctgaaaaggaaaattattcagggcagctaattttgcttttaccaaaatatcagtagtaatatttttggacagtagctaatgggtcagtgggttctttttaatgtttatacttagattttcttttaaaaaaattaaaataaaacaaaaaaaatttctaggactagacgatgtaataccagctaaagccaaacaattatacagtggaaggttttacattattcatccaatgtgtttctattcatgttaagatactactacatttgaagtgggcagagaacatcagatgattgaaatgttcgcccaggggtctccagcaactttggaaatctctttgtatttttacttgaagtgccactaatggacagcagatattttctggctgatgttggtattgggtgtaggaacatgatttaaaaaaaaaactcttgcctctgctttcccccactctgaggcaagttaaaatgtaaaagatgtgatttatctggggggctcaggtatggtggggaagtggattcaggaatctggggaatggcaaatatattaagaagagtattgaaagtatttggaggaaaatggttaattctgggtgtgcaccaaggttcagtagagtccacttctgccctggagaccacaaatcaactagctccatttacagccatttctaaaatggcagcttcagttctagagaagaaagaacaacatcagcagtaaagtccatggaatagctagtggtctgtgtttcttttcgccattgcctagcttgccgtaatgattctataatgccatcatgcagcaattatgagaggctaggtcatccaaagagaagaccctatcaatgtaggttgcaaaatctaacccctaaggaagtgcagtctttgatttgatttccctagtaaccttgcagatatgtttaaccaagccatagcccatgccttttgagggctgaacaaataagggacttactgataatttacttttgatcacattaaggtgttctcaccttgaaatcttatacactgaaatggccattgatttaggccactggcttagagtactccttcccctgcatgacactgattacaaatactttcctattcatactttccaattatgagatggactgtgggtactgggagtgatcactaacaccatagtaatgtctaatattcacaggcagatctgcttggggaagctagttatgtgaaaggcaaataaagtcatacagtagctcaaaaggcaaccataattctctttggtgcaagtcttgggagcgtgatctagattacactgcaccattcccaagttaatcccctgaaaacttactctcaactggagcaaatgaactttggtcccaaatatccatcttttcagtagcgttaattatgctctgtttccaactgcatttcctttccaattgaattaaagtgtggcctcgtttttagtcatttaaaattgttttctaagtaattgctgcctctattatggcacttcaattttgcactgtcttttgagattcaagaaaaatttctattcatttttttgcatccaattgtgcctgaacttttaaaatatgtaaatgctgccatgttccaaacccatcgtcagtgtgtgtgtttagagctgtgcaccctagaaacaacatacttgtcccatgagcaggtgcctgagacacagacccctttgcattcacagagaggtcattggttatagagacttgaattaataagtgacattatgccagtttctgttctctcacaggtgataaacaatgctttttgtgcactacatactcttcagtgtagagctcttgttttatgggaaaaggctcaaatgccaaattgtgtttgatggattaatatgcccttttgccgatgcatactattactgatgtgactcggttttgtcgcagctttgctttgtttaatgaaacacacttgtaaacctcttttgcactttgaaaaagaatccagcgggatgctcgagcacctgtaaacaattttctcaacctatttgatgttcaaataaagaattaaact

SEQ ID NO: 2 - protein, 595 aa, HUMAN
MTMTLHTKASGMALLHQIQGNELEPLNRPQLKIPLERPLGEVYLDSSKPAVYNYPEGAAYEFNAAAAANAQVYGQTGLPYGPGSEAAAFGSNGLGGFPPLNSVSPSPLMLLHPPPQLSPFLQPHGQQVPYYLENEPSGYTVREAGPPAFYRPNSDNRRQGGRERLASTNDKGSMAMESAKETRYCAVCNDYASGYHYGVWSCEGCKAFFKRSIQGHNDYMCPATNQCTIDKNRRKSCQACRLRKCYEVGMMKGGIRKDRRGGRMLKHKRQRDDGEGRGEVGSAGDMRAANLWPSPLMIKRSKKNSLALSLTADQMVSALLDAEPPILYSEYDPTRPFSEASMMGLLTNLADRELVHMINWAKRVPGFVDLTLHDQVHLLECAWLEILMIGLVWRSMEHPVKLLFAPNLLLDRNQGKCVEGMVEIFDMLLATSSRFRMMNLQGEEFVCLKSIILLNSGVYTFLSSTLKSLEEKDHIHRVLDKITDTLIHLMAKAGLTLQQQHQRLAQLLLILSHIRHMSNKGMEHLYSMKCKNVVPLYDLLLEMLDAHRLHAPTSRGGASVEETDQSHLATAGSTSSHSLQKYYITGEAEGFPATV
